(19) United States
(12) Patent Application Publication
(10) Pub. No.: US 2024/0376477 A1
(43) Pub. Date: Nov. 14, 2024

(54) COMPLEMENT COMPONENT iRNA COMPOSITIONS AND METHODS OF USE THEREOF

(71) Applicant: Alnylam Pharmaceuticals, Inc., Cambridge, MA (US)

(72) Inventors: Anna Borodovsky, Melrose, MA (US); Brian Bettencourt, Groton, MA (US)

(21) Appl. No.: 18/405,281

(22) Filed: Jan. 5, 2024

Related U.S. Application Data
(63) Continuation of application No. 17/405,199, filed on Aug. 18, 2021, now abandoned.
Application No. 17/405,199 is a continuation of application No. 16/925,463, filed on Jul. 10, 2020, now abandoned.
Application No. 16/925,463 is a division of application No. 16/574,158, filed on Sep. 18, 2019, now Pat. No. 11,186,842.
Application No. 16/574,158 is a division of application No. 15/176,231, filed on Jun. 8, 2016, now Pat. No. 10,465,194.
Application No. 15/176,231 is a continuation of application No. PCT/US2014/069951, filed on Dec. 12, 2014.
(60) Provisional application No. 61/915,210, filed on Dec. 12, 2013.

(51) Int. Cl. C12N 15/113; A61K 31/713; A61K 38/12; A61K 39/395; C07K 16/18; C12N 15/11

(52) U.S. Cl. CPC C12N 15/1137; A61K 31/713; A61K 38/12; A61K 39/3955; C07K 16/18; C12N 15/111; C12N 15/1138; C12N 2310/14; C12N 2310/315; C12N 2310/321; C12N 2310/343; C12N 2310/346; C12N 2310/351; C12N 2320/51; C12Y 304/21047; Y02A 50/30

(57) ABSTRACT

The invention relates to iRNA, e.g., double-stranded ribonucleic acid (dsRNA), compositions targeting the complement factor B (CFB) gene, the complement component C3 gene, and the complement component C9 gene and methods of using such iRNA, e.g., dsRNA, compositions to inhibit expression of CFB, C9 and/or C3 and to treat subjects having a complement component-associated disease, e.g., paroxysmal nocturnal hemoglobinuria and atypical hemolytic uremic syndrome.

### RELATED APPLICATIONS

[0001] This application is a continuation of U.S. Ser. No. 17/405,199, filed Aug. 18, 2021, which is a continuation of U.S. application Ser. No. 16/925,463, filed on Jul. 10, 2020, which is a divisional application of U.S. Application Ser. No. 16/574,158, filed on Sep. 18, 2019, now, U.S. Pat. No. 11,186,842, issued on Nov. 3, 2021, which is a divisional of U.S. patent application Ser. No. 15/176,231, filed on Jun. 8, 2016, now U.S. Pat. No. 10,465,194, issued on Nov. 5, 2019, which is a 35 § U.S.C. 111 (a) continuation application which claims the benefit of priority to PCT/US2014/069951, filed on Dec. 12, 2014, and to U.S. Provisional Patent Application No. 61/915,210, filed on Dec. 12, 2013. The entire contents of each of the foregoing applications are incorporated herein by reference.

### SEQUENCE LISTING

[0002] The instant application contains a Sequence Listing which has been filed electronically in XML file format and is hereby incorporated by reference in its entirety. Said XML copy, created on Jul. 15, 2024, is named 121301_01106_SL.xml and is 3,461,429 bytes in size.

### BACKGROUND OF THE INVENTION

[0003] Complement was first discovered in the 1890s when it was found to aid or “complement” the killing of bacteria by heat-stable antibodies present in normal serum (Walport, M. J. (2001) N Engl J Med. 344:1058). The complement system consists of more than 30 proteins that are either present as soluble proteins in the blood or are present as membrane-associated proteins. Activation of complement leads to a sequential cascade of enzymatic reactions, known as complement activation pathways resulting in the formation of the potent anaphylatoxins C3a and C5a that elicit a plethora of physiological responses that range from chemoattraction to apoptosis. Initially, complement was thought to play a major role in innate immunity where a robust and rapid response is mounted against invading pathogens. However, recently it is becoming increasingly evident that complement also plays an important role in adaptive immunity involving T and B cells that help in elimination of pathogens (Dunkelberger J R and Song W C. (2010) Cell Res. 20:34; Molina H, et al. (1996) Proc Natl Acad Sci USA. 93:3357), in maintaining immunologic memory preventing pathogenic re-invasion, and is involved in numerous human pathological states (Qu, H, et al. (2009) Mol Immunol. 47:185; Wagner, E. and Frank M M. (2010) Nat Rev Drug Discov. 9:43).

[0004] Complement activation is known to occur through three different pathways: alternate, classical and lectin (FIG. 1) involving proteins that mostly exist as inactive zymogens that are then sequentially cleaved and activated.

[0005] The classical pathway is often activated by antibody-antigen complexes or by the C-reactive protein (CRP), both of which interact with complement component Clq. In addition, the classical pathway can be activated by phosphatidyl serine present in apoptotic bodies in the absence of immune complexes.

[0006] The lectin pathway is initiated by the mannose-binding lectins (MBL) that bind to complex carbohydrate residues on the surface of pathogens. The activation of the classical pathway or the lectin pathway leads to activation of the (C4b2b) C3 convertase.

[0007] The alternate pathway is activated by the binding of C3b, which is spontaneously generated by the hydrolysis of C3, on targeted surfaces. This surface-bound C3b is then recognized by factor B, forming the complex C3bB. The C3bB complex, in turn, is cleaved by factor D to yield the active form of the C3 convertase of the AP (C3bBb). Both types of C3 convertases will cleave C3, forming C3b. C3b then either binds to more factor B, enhancing the complement activation through the AP (the so-called alternative or amplification loop), or leads to the formation of the active C5 convertase (C3bBbC3b or C4bC2bC3b), which cleaves C5 and triggers the late events that result in the formation of the membrane attack complex (MAC) (C5b-9).

[0008] Inappropriate activation of the complement system is responsible for propagating and/or initiating pathology in many different diseases, including, for example, paroxysmal nocturnal hemoglobinuria, atypical hemolytic uremic syndrome, rheumatoid arthritis, ischemia-reperfusion injuries and neurodegenerative diseases.

[0009] To date, only one therapeutic that targets the C5-C5a axis is available for the treatment of complement component-associated diseases, the anti-C5 antibody, eculizumab (Soliris®). Although eculizumab has been shown to be effective for the treatment of paroxysmal nocturnal hemoglobinuria (PNH) and atypical hemolytic uremic syndrome (aHUS) and is currently being evaluated in clinical trials for additional complement component-associated diseases, eculizumab therapy requires weekly high dose infusions followed by biweekly maintenance infusions at a high cost. Furthermore, approximately 50% of eculizumab-treated PNH subjects have low level of hemolysis and require residual transfusions (Hill A, et al. (2010) Haematologica 95 (4): 567-73). Accordingly, there is a need in the art for alternative therapies and combination therapies for subjects having a complement component-associated disease.

### SUMMARY OF THE INVENTION

[0010] The present invention provides iRNA compositions which effect the RNA-induced silencing complex (RISC)-mediated cleavage of RNA transcripts of a CFB gene. The CFB gene may be within a cell, e.g., a cell within a subject, such as a human.

[0011] The present invention also provides iRNA compositions which effect the RNA-induced silencing complex (RISC)-mediated cleavage of RNA transcripts of a C3 gene. The C3 gene may be within a cell, e.g., a cell within a subject, such as a human.

[0012] In addition, the present invention provides iRNA compositions which effect the RNA-induced silencing complex (RISC)-mediated cleavage of RNA transcripts of a C9 gene. The C9 gene may be within a cell, e.g., a cell within a subject, such as a human. The present invention also provides methods and combination therapies for treating a subject having a disorder that would benefit from inhibiting or reducing the expression of a CFB, C3, and/or C9 gene, e.g., a complement component-associated disease, such as paroxysmal nocturnal hemoglobinuria (PNH) and atypical hemolytic uremic syndrome (aHUS) using iRNA compositions which effect the RNA-induced silencing complex (RISC)-mediated cleavage of RNA transcripts of a CFB, C3, and/or C9 gene for inhibiting the expression of a CFB, C3, and/or C9 gene.

[0013] Accordingly, in one aspect the present invention provides double-stranded ribonucleic acids (dsRNA) for inhibiting expression of complement factor B (CFB) in a cell, wherein the dsRNA comprises a sense strand and an antisense strand, wherein the sense strand comprises at least 15 contiguous nucleotides differing by no more than 3 nucleotides from any one of the nucleotide sequence of SEQ ID NOs: 1-5, 27, and 30, and the antisense strand comprises at least 15 contiguous nucleotides differing by no more than 3 nucleotides from any one of the nucleotide sequence of SEQ ID NOs: 12-16, 33, and 36.

[0014] In another aspect the present invention provides double-stranded ribonucleic acids (dsRNA) for inhibiting expression of complement factor B (CFB) in a cell, wherein the dsRNA comprises a sense strand and an antisense strand, the antisense strand comprising a region of complementarity which comprises at least 15 contiguous nucleotides differing by no more than 3 nucleotides from any one of the antisense sequences listed in Table 3 and 4.

[0015] In one embodiment, the sense and antisense strands comprise sequences selected from the group consisting of AD-60304, AD-60331, and AD-60344 and any one of the agents listed in Tables 3 and 4.

[0016] In one embodiment the region of complementarity consists of the nucleotide sequence of one of the antisense sequences of any one of Tables 3 and 4.

[0017] In one embodiment, the dsRNA comprises a sense strand consisting of the nucleotide sequence of a sense strand sequence selected from the sequence of any one of Tables 3 and 4, and an antisense strand consisting of the nucleotide sequence of an antisense sequence selected from the sequences of any one of Tables 3 and 4.

[0018] In another aspect the present invention provides double-stranded ribonucleic acids (dsRNA) for inhibiting expression of complement component C3 in a cell, wherein the dsRNA comprises a sense strand and an antisense strand, wherein the sense strand comprises at least 15 contiguous nucleotides differing by no more than 3 nucleotides from any one of the nucleotide sequence of SEQ ID NOs: 6-8, 28, and 31, and the antisense strand comprises at least 15 contiguous nucleotides differing by no more than 3 nucleotides from any one of the nucleotide sequence of SEQ ID NOs: 17-19, 34, and 37.

[0019] In another aspect the present invention provides double-stranded ribonucleic acids (dsRNA) for inhibiting expression of complement component C3 in a cell, wherein the dsRNA comprises a sense strand and an antisense strand, the antisense strand comprising a region of complementarity which comprises at least 15 contiguous nucleotides differing by no more than 3 nucleotides from any one of the antisense sequences listed in Table 5 and 6.

[0020] In one embodiment, the sense and antisense strands comprise sequences selected from the group consisting of AD-60169 and any one of the agents listed in Tables 5 and 6.

[0021] In one embodiment the region of complementarity consists of the nucleotide sequence of one of the antisense sequences of any one of Tables 5 and 6.

[0022] In one embodiment, the dsRNA comprises a sense strand consisting of the nucleotide sequence of a sense strand sequence selected from the sequence of any one of Tables 5 and 6, and an antisense strand consisting of the nucleotide sequence of an antisense sequence selected from the sequences of any one of Tables 5 and 6.

[0023] In another aspect the present invention provides double-stranded ribonucleic acids (dsRNA) for inhibiting expression of complement component C9 in a cell, wherein the dsRNA comprises a sense strand and an antisense strand, wherein the sense strand comprises at least 15 contiguous nucleotides differing by no more than 3 nucleotides from any one of the nucleotide sequence of SEQ ID NOs: 9-11, 29, and 32, and the antisense strand comprises at least 15 contiguous nucleotides differing by no more than 3 nucleotides from any one of the nucleotide sequence of SEQ ID NOs: 20-22, 35, and 38.

[0024] In another aspect the present invention provides double-stranded ribonucleic acids (dsRNA) for inhibiting expression of complement component C9 in a cell, wherein the dsRNA comprises a sense strand and an antisense strand, the antisense strand comprising a region of complementarity which comprises at least 15 contiguous nucleotides differing by no more than 3 nucleotides from any one of the antisense sequences listed in Table 7 and 8.

[0025] In one embodiment, the sense and antisense strands comprise sequences selected from the group consisting of any one of the agents listed in Tables 7 and 8.

[0026] In one embodiment the region of complementarity consists of the nucleotide sequence of one of the antisense sequences of any one of Tables 7 and 8.

[0027] In one embodiment, the dsRNA comprises a sense strand consisting of the nucleotide sequence of a sense strand sequence selected from the sequence of any one of Tables 7 and 8, and an antisense strand consisting of the nucleotide sequence of an antisense sequence selected from the sequences of any one of Tables 7 and 8.

[0028] The dsRNA may include at least one modified nucleotide, e.g., a 2′-O-methyl modified nucleotide, a nucleotide comprising a 5′-phosphorothioate group, a deoxynucleotide, a 3′-terminal deoxy-thymine (dT) nucleotide, a 2′-O-methyl modified nucleotide, a 2′-fluoro modified nucleotide, a 2′-deoxy-modified nucleotide, a terminal nucleotide linked to a cholesteryl derivative or a dodecanoic acid bisdecylamide group, a 2′-deoxy-2′-fluoro modified nucleotide, a locked nucleotide, an unlocked nucleotide, a conformationally restricted nucleotide, a constrained ethyl nucleotide, an abasic nucleotide, a 2′-amino-modified nucleotide, a 2′-O-allyl-modified nucleotide, 2′-C-alkyl-modified nucleotide, 2′-hydroxly-modified nucleotide, a 2′-methoxyethyl modified nucleotide, a 2′-O-alkyl-modified nucleotide, a morpholino nucleotide, a phosphoramidate, a non-natural base comprising nucleotide, a tetrahydropyran modified nucleotide, a 1,5-anhydrohexitol modified nucleotide, a cyclohexenyl modified nucleotide, a nucleotide comprising a phosphorothioate group, a nucleotide comprising a methylphosphonate group, a nucleotide comprising a 5′-phosphate, and a nucleotide comprising a 5′-phosphate mimic.

[0029] In one embodiment, substantially all the nucleotides of the sense strand and the antisense strand are modified nucleotides. In another embodiment, all the nucleotides of the sense strand and the antisense strand are modified nucleotides.

[0030] The region of complementarity may be at least 17 nucleotides in length, such as 19 nucleotides in length, or no more than 30 nucleotides in length.

[0031] The region of complementarity may be between 19 and 21 nucleotides in length.

[0032] At least one strand of the dsRNA may include a 3′ overhang of at least 1 nucleotide, or at least 2 nucleotides.

[0033] The dsRNA may further include a ligand. In one embodiment, the ligand is conjugated to the 3′ end of the sense strand of the dsRNA. In one embodiment, the ligand is an N-acetylgalactosamine (GalNAc) derivative. In one embodiment, the ligand is

[chemical structure]

[0034] In one embodiment, the dsRNA is conjugated to the ligand as shown in the following schematic

[chemical structure]

[0035] and, wherein X is O or S.

[0036] In one embodiment, the X is O.

[0037] In another aspect, the present invention provides double stranded RNAi agents capable of inhibiting the expression of complement factor B (CFB) in a cell. The agents include a sense strand complementary to an antisense strand, wherein the antisense strand comprises a region complementary to part of an mRNA encoding CFB, wherein each strand is about 14 to about 30 nucleotides in length, wherein the double stranded RNAi agent is represented by formula (III):

sense: 5′nₚ-Nₐ-(X X X)ᵢ-N_{b}-Y Y Y-N_{b}-(ZZZ)ⱼ-Nₐ-n_{q}3′

antisense: 3′nₚ′-Nₐ′-(X′X′X′)ₖ-N_{b}′-Y′Y′Y′-N_{b}′-(Z′Z′Z′)ₗ-Nₐ′-n_{q}′5′ (III)

wherein:
[0038] i, j, k, and l are each independently 0 or 1;
[0039] p, p′, q, and q′ are each independently 0-6;
[0040] each Nₐ and Nₐ′ independently represents an oligonucleotide sequence comprising 0-25 nucleotides which are either modified or unmodified or combinations thereof, each sequence comprising at least two differently modified nucleotides;
[0041] each N_{b} and N_{b}′ independently represents an oligonucleotide sequence comprising 0-10 nucleotides which are either modified or unmodified or combinations thereof;
[0042] each nₚ, nₚ′, n_{q}, and n_{q}′, each of which may or may not be present, independently represents an overhang nucleotide;
[0043] XXX, YYY, ZZZ, X′X′X′, Y′Y′Y′, and Z′Z′Z′ each independently represent one motif of three identical modifications on three consecutive nucleotides;
[0044] modifications on N_{b} differ from the modification on Y and modifications on N_{b}′ differ from the modification on Y′; and
[0045] wherein the sense strand is conjugated to at least one ligand.

[0046] In another aspect, the present invention provides double stranded RNAi agents capable of inhibiting the expression of complement component 3 (C3) in a cell. The agents include a sense strand complementary to an antisense strand, wherein the antisense strand comprises a region complementary to part of an mRNA encoding C3, wherein each strand is about 14 to about 30 nucleotides in length, wherein the double stranded RNAi agent is represented by formula (III):

sense: 5′nₚ-Nₐ-(X X X)ᵢ-N_{b}-Y Y Y-N_{b}-(Z Z Z)ⱼ-Nₐ-n_{q}3′

antisense: 3′nₚ′-Nₐ′-(X′X′X′)ₖ-N_{b}′-Y′Y′Y′-N_{b}′-(Z′Z′Z′)ₗ-Nₐ′-n_{q}′5′ (III)
[0047] wherein:
[0048] i, j, k, and l are each independently 0 or 1;
[0049] p, p′, q, and q′ are each independently 0-6;
[0050] each Nₐ and Nₐ′ independently represents an oligonucleotide sequence comprising 0-25 nucleotides which are either modified or unmodified or combinations thereof, each sequence comprising at least two differently modified nucleotides;
[0051] each N_{b} and N_{b}′ independently represents an oligonucleotide sequence comprising 0-10 nucleotides which are either modified or unmodified or combinations thereof;
[0052] each nₚ, nₚ′, n_{q}, and n_{q}′, each of which may or may not be present, independently represents an overhang nucleotide;
[0053] XXX, YYY, ZZZ, X′X′X′, Y′Y′Y′, and Z′Z′Z′ each independently represent one motif of three identical modifications on three consecutive nucleotides;
[0054] modifications on N_{b} differ from the modification on Y and modifications on N_{b}′ differ from the modification on Y′; and
[0055] wherein the sense strand is conjugated to at least one ligand.

[0056] In a further aspect, the present invention provides double stranded RNAi agents capable of inhibiting the expression of complement component 9 (C9) in a cell. The agents include a sense strand complementary to an antisense strand, wherein the antisense strand comprises a region complementary to part of an mRNA encoding C9, wherein each strand is about 14 to about 30 nucleotides in length, wherein the double stranded RNAi agent is represented by formula (III):

sense: 5′nₚ-Nₐ-(X X X)ᵢ-N_{b}-Y Y Y-N_{b}-(ZZZ)ⱼ-Nₐ-n_{q}3′

antisense: 3′nₚ′-Nₐ′-(X′X′X′)ₖ-N_{b}′-Y′Y′Y′-N_{b}′-(Z′Z′Z′)ₗ-Nₐ′-n_{q}′5′ (III)
[0057] wherein:
[0058] i, j, k, and l are each independently 0 or 1;
[0059] p, p′, q, and q′ are each independently 0-6;
[0060] each Nₐ and Nₐ′ independently represents an oligonucleotide sequence comprising 0-25 nucleotides which are either modified or unmodified or combinations thereof, each sequence comprising at least two differently modified nucleotides;
[0061] each N_{b} and N_{b}′ independently represents an oligonucleotide sequence comprising 0-10 nucleotides which are either modified or unmodified or combinations thereof;
[0062] each nₚ, nₚ′, n_{q}, and n_{q}′, each of which may or may not be present, independently represents an overhang nucleotide;
[0063] XXX, YYY, ZZZ, X′X′X′, Y′Y′Y′, and Z′Z′Z′ each independently represent one motif of three identical modifications on three consecutive nucleotides;
[0064] modifications on N_{b} differ from the modification on Y and modifications on N_{b}′ differ from the modification on Y′; and
[0065] wherein the sense strand is conjugated to at least one ligand.

[0066] In one embodiment, i is 0; j is 0; i is 1; j is 1; both i and j are 0; or both i and j are 1.

[0067] In one embodiment, k is 0; 1 is 0; k is 1; 1 is 1; both k and l are 0; or both k and 1 are 1.

[0068] In one embodiment, XXX is complementary to X′X′X′, YYY is complementary to Y′Y′Y′, and ZZZ is complementary to Z′Z′Z′.

[0069] In one embodiment, the YYY motif occurs at or near the cleavage site of the sense strand.

[0070] In one embodiment, the Y′Y′Y′ motif occurs at the 11, 12 and 13 positions of the antisense strand from the 5′-end.

[0071] In one embodiment, the Y′ is 2′-O-methyl.

[0072] In one embodiment, formula (III) is represented by formula (IIIa):

sense: 5′nₚ-Nₐ-Y Y Y-Nₐ-n_{q}3′

antisense: 3′nₚ′-Nₐ′-Y′Y′Y′-Nₐ′-n_{q}′5′ (IIIa).

[0073] In one embodiment, formula (III) is represented by formula (IIIb):

sense: 5′nₚ-Nₐ-Y Y Y—N_{b}-ZZZ-Nₐ-n_{q}3′

antisense: 3′nₚ′-Nₐ′Y′Y′Y′-N_{b}—Z′Z′Z′-Nₐ′-n_{q}′5′ (IIIb)
[0074] wherein each N_{b} and N_{b}′ independently represents an oligonucleotide sequence comprising 1-5 modified nucleotides.

[0075] In one embodiment, formula (III) is represented by formula (IIIc):

sense: 5′nₚ-Nₐ-XXX-N_{b}-Y Y Y-Nₐ-n_{q}3′

antisense: 3′nₚ′-Nₐ′-X′X′X′-N_{b′}-Y′Y′Y′-Nₐ′-n_{q}′5′ (IIIc)
[0076] wherein each N_{b} and N_{b}′ independently represents an oligonucleotide sequence comprising 1-5 modified nucleotides.

[0077] In one embodiment, formula (III) is represented by formula (IIId):

sense: 5′nₚ-Nₐ-X X X-N_{b}-Y Y Y-N_{b}-Z Z Z-Nₐ-n_{q}3′

antisense: 3′nₚ′-Nₐ-X′X′X′-N_{b′}-Y′Y′Y′-N_{b}—Z′Z′Z′-Nₐ′-n_{q}′5′ (IIId)
[0078] wherein each N_{b} and N_{b}′ independently represents an oligonucleotide sequence comprising 1-5 modified nucleotides and each Nₐ and Nₐ′ independently represents an oligonucleotide sequence comprising 2-10 modified nucleotides.

[0079] The double-stranded region May 15-30 nucleotide pairs in length, 17-23 nucleotide pairs in length, 17-25 nucleotide pairs in length, 23-27 nucleotide pairs in length, 19-21 nucleotide pairs in length, or 21-23 nucleotide pairs in length.

[0080] In one embodiment, each strand has 15-30 nucleotides.

[0081] In one embodiment, the modifications on the nucleotides are selected from the group consisting of LNA, HNA, CeNA, 2′-methoxyethyl, 2′-O-alkyl, 2′-O-allyl, 2′-C-allyl, 2′-fluoro, 2′-deoxy, 2′-hydroxyl, and combinations thereof.

[0082] In one embodiment, the modifications on the nucleotides are 2′-O-methyl or 2′-fluoro modifications.

[0083] In one embodiment, the ligand is one or more GalNAc derivatives attached through a bivalent or trivalent branched linker.

[0084] In one embodiment, the ligand is

[chemical structure]

[0085] In one embodiment, the ligand is attached to the 3′ end of the sense strand.

[0086] In one embodiment, the RNAi agent is conjugated to the ligand as shown in the following schematic

[chemical structure]

[0087] and, wherein X is O or S.

[0088] In one embodiment, the X is O.

[0089] In one embodiment, the agent further comprises at least one phosphorothioate or methylphosphonate internucleotide linkage.

[0090] In one embodiment, the phosphorothioate or methylphosphonate internucleotide linkage is at the 3′-terminus of one strand. In one embodiment, the strand is the antisense strand. In another embodiment, the strand is the sense strand.

[0091] In another embodiment, the phosphorothioate or methylphosphonate internucleotide linkage is at the 5′-terminus of one strand. In one embodiment, the strand is the antisense strand. In another embodiment, the strand is the sense strand.

[0092] In one embodiment, the phosphorothioate or methylphosphonate internucleotide linkage is at the both the 5′- and 3′-terminus of one strand. In one embodiment, the strand is the antisense strand.

[0093] In one embodiment, the base pair at the 1 position of the 5′-end of the antisense strand of the duplex is an AU base pair.

[0094] In one embodiment, the Y nucleotides contain a 2′-fluoro modification.

[0095] In one embodiment, the Y′ nucleotides contain a 2′-O-methyl modification. In one embodiment, p′>0. In another embodiment, p′=2.

[0096] In one embodiment, q′=0, p=0, q=0, and p′ overhang nucleotides are complementary to the target mRNA.

[0097] In another embodiment, q′=0, p=0, q=0, and p′ overhang nucleotides are non-complementary to the target mRNA.

[0098] In one embodiment, the sense strand has a total of 21 nucleotides and the antisense strand has a total of 23 nucleotides.

[0099] In one embodiment, at least one np′ is linked to a neighboring nucleotide via a phosphorothioate linkage. In another embodiment, all np′ are linked to neighboring nucleotides via phosphorothioate linkages.

[0100] In one embodiment, the RNAi agent is selected from the group of RNAi agents listed in Tables 3 and 4. In one embodiment, the RNAi agent is selected from the group of RNAi agents AD-60304, AD-60331, and AD-60344.

[0101] In another embodiment, the RNAi agent is selected from the group of RNAi agents listed in Tables 5 and 6.

[0102] In yet another embodiment, the RNAi agent is selected from the group of RNAi agents listed in Tables 7 and 8.

[0103] In one aspect, the present invention provides double stranded RNAi agents comprising the RNAi agents listed in any one of Tables 3, 5, and 7.

[0104] In one aspect, the present invention provides compositions comprising a modified antisense polynucleotide agent. The agents are capable of inhibiting the expression of Complement Factor B (CFB) in a cell, and include a sequence complementary to a sense sequence selected from the group of the sequences listed in Table 3, wherein the polynucleotide is about 14 to about 30 nucleotides in length.

[0105] In another aspect, the present invention provides compositions comprising a modified antisense polynucleotide agent. The agents are capable of inhibiting the expression of Complement Component 3 (C3) in a cell, and include a sequence complementary to a sense sequence selected from the group of the sequences listed in Table 5, wherein the polynucleotide is about 14 to about 30 nucleotides in length.

[0106] In yet another aspect, the present invention provides compositions comprising a modified antisense polynucleotide agent. The agents are capable of inhibiting the expression of Complement Component 9 (C9) in a cell, and include a sequence complementary to a sense sequence selected from the group of the sequences listed in Table 7, wherein the polynucleotide is about 14 to about 30 nucleotides in length.

[0107] In one aspect, the present invention provides double stranded RNAi agents capable of inhibiting the expression of Complement Factor B (CFB) in a cell. The agent include a sense strand complementary to an antisense strand, wherein the antisense strand comprises a region complementary to part of an mRNA encoding CFB, wherein each strand is about 14 to about 30 nucleotides in length, wherein the double stranded RNAi agent is represented by formula (III):

sense: 5′nₚ-Nₐ-(X X X)ᵢ-N_{b}-Y Y Y-N_{b}-(ZZZ)ⱼ-Nₐ-n_{q}3′

antisense: 3′nₚ′-Nₐ′-(X′X′X′)ₖ-N_{b}′-Y′Y′Y′-N_{b}′-(Z′Z′Z′)ₗ-Nₐ′-n_{q}′5′ (III)
[0108] wherein:

[0109] i, j, k, and l are each independently 0 or 1;
[0110] p, p′, q, and q′ are each independently 0-6;
[0111] each Nₐ and Nₐ′ independently represents an oligonucleotide sequence comprising 0-25 nucleotides which are either modified or unmodified or combinations thereof, each sequence comprising at least two differently modified nucleotides;
[0112] each N_{b} and N_{b}′ independently represents an oligonucleotide sequence comprising 0-10 nucleotides which are either modified or unmodified or combinations thereof;
   [0113] each nₚ, nₚ′, n_{q}, and n_{q}′, each of which may or may not be present independently represents an overhang nucleotide;
[0114] XXX, YYY, ZZZ, X′X′X′, Y′Y′Y′, and Z′Z′Z′ each independently represent one motif of three identical modifications on three consecutive nucleotides, and wherein the modifications are 2′-O-methyl or 2′-fluoro modifications;
[0115] modifications on N_{b} differ from the modification on Y and modifications on N_{b}′ differ from the modification on Y′; and
[0116] wherein the sense strand is conjugated to at least one ligand.

[0117] In another aspect, the invention provides double stranded RNAi agents capable of inhibiting the expression of Complement Factor B (CFB) in a cell. The agents include a sense strand complementary to an antisense strand, wherein the antisense strand comprises a region complementary to part of an mRNA encoding CFB, wherein each strand is about 14 to about 30 nucleotides in length, wherein the double stranded RNAi agent is represented by formula (III):

sense: 5′nₚ-Nₐ-(X X X)ᵢ-N_{b}-Y Y Y-N_{b}-(Z Z Z)ⱼ-Nₐ-n_{q}3′

antisense: 3′nₚ′-Nₐ′-(X′X′X′)ₖ-N_{b}′-Y′Y′Y′-N_{b}′-(Z′Z′Z′)-Nₐ′-n_{q}′5′ (III)
[0118] wherein:
[0119] i, j, k, and l are each independently 0 or 1;
[0120] each nₚ, n_{q}, and n_{q}′, each of which may or may not be present, independently represents an overhang nucleotide;
   [0121] p, q, and q′ are each independently 0-6;
   [0122] nₚ′>0 and at least one nₚ′ is linked to a neighboring nucleotide via a phosphorothioate linkage;
[0123] each Nₐ and Nₐ′ independently represents an oligonucleotide sequence comprising 0-25 nucleotides which are either modified or unmodified or combinations thereof, each sequence comprising at least two differently modified nucleotides;
[0124] each N_{b} and N_{b}′ independently represents an oligonucleotide sequence comprising 0-10 nucleotides which are either modified or unmodified or combinations thereof;
   [0125] XXX, YYY, ZZZ, X′X′X′, Y′Y′Y′, and Z′Z′Z′ each independently represent one motif of three identical modifications on three consecutive nucleotides, and wherein the modifications are 2′-O-methyl or 2′-fluoro modifications;
[0126] modifications on N_{b} differ from the modification on Y and modifications on N_{b}′ differ from the modification on Y′; and
[0127] wherein the sense strand is conjugated to at least one ligand.

[0128] In another aspect, the present invention provides double stranded RNAi agents capable of inhibiting the expression of Complement Factor B (CFB) in a cell. The agents include a sense strand complementary to an antisense strand, wherein the antisense strand comprises a region complementary to part of an mRNA encoding CFB, wherein each strand is about 14 to about 30 nucleotides in length, wherein the double stranded RNAi agent is represented by formula (III):

sense: 5′nₚ-Nₐ-(X X X)ᵢ-N_{b}-Y Y Y-N_{b}-(Z Z Z)ⱼ-Nₐ-n_{q}3′

antisense: 3′nₚ′-Nₐ′-(X′X′X′)ₖ-N_{b}′-Y′Y′Y′-N_{b}′-(Z′Z′Z′)ₗ-Nₐ′-n_{q}′5′ (III)
[0129] wherein:
[0130] i, j, k, and l are each independently 0 or 1;
[0131] each nₚ, n_{q}, and n_{q}′, each of which may or may not be present, independently represents an overhang nucleotide;
   [0132] p, q, and q′ are each independently 0-6;
   [0133] nₚ′>0 and at least one nₚ′ is linked to a neighboring nucleotide via a phosphorothioate linkage;
[0134] each Nₐ and Nₐ′ independently represents an oligonucleotide sequence comprising 0-25 nucleotides which are either modified or unmodified or combinations thereof, each sequence comprising at least two differently modified nucleotides;
[0135] each N_{b} and N_{b}′ independently represents an oligonucleotide sequence comprising 0-10 nucleotides which are either modified or unmodified or combinations thereof;
   [0136] XXX, YYY, ZZZ, X′X′X′, Y′Y′Y′, and Z′Z′Z′ each independently represent one motif of three identical modifications on three consecutive nucleotides, and wherein the modifications are 2′-O-methyl or 2′-fluoro modifications;
[0137] modifications on N_{b} differ from the modification on Y and modifications on N_{b}′ differ from the modification on Y′; and
[0138] wherein the sense strand is conjugated to at least one ligand, wherein the ligand is one or more GalNAc derivatives attached through a bivalent or trivalent branched linker.

[0139] In yet a further aspect, the present invention provides double stranded RNAi agents capable of inhibiting the expression of Complement Factor B (CFB) in a cell. The agents include a sense strand complementary to an antisense strand, wherein the antisense strand comprises a region complementary to part of an mRNA encoding CFB, wherein each strand is about 14 to about 30 nucleotides in length, wherein the double stranded RNAi agent is represented by formula (III):

sense: 5′nₚ-Nₐ-(X X X)ᵢ-N_{b}-Y Y Y-N_{b}-(ZZZ)ⱼ-Nₐ-n_{q}3′

antisense: 3′nₚ′-Nₐ′-(X′X′X′)ₖ-N_{b}′-Y′Y′Y′-N_{b}′-(Z′Z′Z′)ₗ-Nₐ′-n_{q}′5′ (III)
[0140] wherein:
[0141] i, j, k, and l are each independently 0 or 1;
[0142] each nₚ, n_{q}, and n_{q}′, each of which may or may not be present, independently represents an overhang nucleotide;
[0143] p, q, and q′ are each independently 0-6;
[0144] nₚ′>0 and at least one nₚ′ is linked to a neighboring nucleotide via a phosphorothioate linkage;
[0145] each Nₐ and Nₐ′ independently represents an oligonucleotide sequence comprising 0-25 nucleotides which are either modified or unmodified or combinations thereof, each sequence comprising at least two differently modified nucleotides;
[0146] each N_{b} and N_{b}′ independently represents an oligonucleotide sequence comprising 0-10 nucleotides which are either modified or unmodified or combinations thereof;
   [0147] XXX, YYY, ZZZ, X′X′X′, Y′Y′Y′, and Z′Z′Z′ each independently represent one motif of three identical modifications on three consecutive nucleotides, and wherein the modifications are 2′-O-methyl or 2′-fluoro modifications;
[0148] modifications on N_{b} differ from the modification on Y and modifications on N_{b}′ differ from the modification on Y′;
[0149] wherein the sense strand comprises at least one phosphorothioate linkage; and
   [0150] wherein the sense strand is conjugated to at least one ligand, wherein the ligand is one or more GalNAc derivatives attached through a bivalent or trivalent branched linker.

[0151] In another aspect, the invention provides double stranded RNAi agents capable of inhibiting the expression of Complement Factor B (CFB) in a cell. The agents include a sense strand complementary to an antisense strand, wherein the antisense strand comprises a region complementary to part of an mRNA encoding CFB, wherein each strand is about 14 to about 30 nucleotides in length, wherein the double stranded RNAi agent is represented by formula (III):

sense: 5′nₚ-Nₐ-Y Y Y-Nₐ-n_{q}3′

antisense: 3′nₚ′-Nₐ′-Y′Y′Y′-Nₐ′-n_{q}′5′ (IIIa)
[0152] wherein:
[0153] each nₚ, n_{q}, and n_{q}′, each of which may or may not be present, independently represents an overhang nucleotide;
   [0154] p, q, and q′ are each independently 0-6;
   [0155] nₚ′>0 and at least one nₚ′ is linked to a neighboring nucleotide via a phosphorothioate linkage;
[0156] each Nₐ and Nₐ′ independently represents an oligonucleotide sequence comprising 0-25 nucleotides which are either modified or unmodified or combinations thereof, each sequence comprising at least two differently modified nucleotides;
   [0157] YYY and Y′Y′Y′ each independently represent one motif of three identical modifications on three consecutive nucleotides, and wherein the modifications are 2′-O-methyl or 2′-fluoro modifications;
   [0158] wherein the sense strand comprises at least one phosphorothioate linkage; and
[0159] wherein the sense strand is conjugated to at least one ligand, wherein the ligand is one or more GalNAc derivatives attached through a bivalent or trivalent branched linker.

[0160] In one aspect, the present invention provides double stranded RNAi agents capable of inhibiting the expression of Complement Component 3 (C3) in a cell. The agents include a sense strand complementary to an antisense strand, wherein the antisense strand comprises a region complementary to part of an mRNA encoding C3, wherein each strand is about 14 to about 30 nucleotides in length, wherein the double stranded RNAi agent is represented by formula (III):

sense: 5′nₚ-Nₐ-(X X X)ᵢ-N_{b}-Y Y Y-N_{b}-(Z Z Z)ⱼ-Nₐ-n_{q}3′

antisense: 3′nₚ′-Nₐ′-(X′X′X′)ₖ-N_{b}′-Y′Y′Y′-N_{b}′-(Z′Z′Z′)ₗ-Nₐ′-n_{q}′5′ (III)
[0161] wherein:
[0162] i, j, k, and l are each independently 0 or 1;
[0163] p, p′, q, and q′ are each independently 0-6;
[0164] each Nₐ and Nₐ′ independently represents an oligonucleotide sequence comprising 0-25 nucleotides which are either modified or unmodified or combinations thereof, each sequence comprising at least two differently modified nucleotides;
[0165] each N_{b} and N_{b}′ independently represents an oligonucleotide sequence comprising 0-10 nucleotides which are either modified or unmodified or combinations thereof;
   [0166] each nₚ, nₚ′, n_{q}, and n_{q}′, each of which may or may not be present independently represents an overhang nucleotide;
[0167] XXX, YYY, ZZZ, X′X′X′, Y′Y′Y′, and Z′Z′Z′ each independently represent one motif of three identical modifications on three consecutive nucleotides, and wherein the modifications are 2′-O-methyl or 2′-fluoro modifications;
[0168] modifications on N_{b} differ from the modification on Y and modifications on N_{b}′ differ from the modification on Y′; and
[0169] wherein the sense strand is conjugated to at least one ligand.

[0170] In another aspect, the present invention provides double stranded RNAi agents capable of inhibiting the expression of Complement Component 3 (C3) in a cell. The agents include a sense strand complementary to an antisense strand, wherein the antisense strand comprises a region complementary to part of an mRNA encoding C3, wherein each strand is about 14 to about 30 nucleotides in length, wherein the double stranded RNAi agent is represented by formula (III):

sense: 5′nₚ-Nₐ-(X X X)ᵢ-N_{b}-Y Y Y-N_{b}-(ZZZ)ⱼ-Nₐ-n_{q}3′

antisense: 3′nₚ′-Nₐ′-(X′X′X′)ₖ-N_{b}′-Y′Y′Y′-N_{b}′-(Z′Z′Z′)ₗ-Nₐ′-n_{q}′5′ (III)
[0171] wherein:
[0172] i, j, k, and l are each independently 0 or 1;
[0173] each nₚ, n_{q}, and n_{q}′, each of which may or may not be present, independently represents an overhang nucleotide;
   [0174] p, q, and q′ are each independently 0-6;
   [0175] nₚ′>0 and at least one nₚ′ is linked to a neighboring nucleotide via a phosphorothioate linkage;
[0176] each Nₐ and Nₐ′ independently represents an oligonucleotide sequence comprising 0-25 nucleotides which are either modified or unmodified or combinations thereof, each sequence comprising at least two differently modified nucleotides;
[0177] each N_{b} and N_{b}′ independently represents an oligonucleotide sequence comprising 0-10 nucleotides which are either modified or unmodified or combinations thereof;
   [0178] XXX, YYY, ZZZ, X′X′X′, Y′Y′Y′, and Z′Z′Z′ each independently represent one motif of three identical modifications on three consecutive nucleotides, and wherein the modifications are 2′-O-methyl or 2′-fluoro modifications;
[0179] modifications on N_{b} differ from the modification on Y and modifications on N_{b}′ differ from the modification on Y′; and
[0180] wherein the sense strand is conjugated to at least one ligand.

[0181] In another aspect, the invention provides double stranded RNAi agents capable of inhibiting the expression of Complement Component 3 (C3) in a cell. The agents include a sense strand complementary to an antisense strand, wherein the antisense strand comprises a region complementary to part of an mRNA encoding C3, wherein each strand is about 14 to about 30 nucleotides in length, wherein the double stranded RNAi agent is represented by formula (III):

sense: 5′nₚ-Nₐ-(XXX)ᵢ-N_{b}-Y Y Y-N_{b}-(ZZZ)ⱼ-Nₐ-n_{q}3′

antisense: 3′nₚ′-Nₐ′-(X′X′X′)ₖ-N_{b}′-Y′Y′Y′-N_{b}′-(Z′Z′Z′)ₗ-Nₐ′-n_{q}′5′ (III)
[0182] wherein:
[0183] i, j, k, and l are each independently 0 or 1;
[0184] each nₚ, n_{q}, and n_{q}′, each of which may or may not be present, independently represents an overhang nucleotide;
   [0185] p, q, and q′ are each independently 0-6;
   [0186] nₚ′>0 and at least one nₚ′ is linked to a neighboring nucleotide via a phosphorothioate linkage;
[0187] each Nₐ and Nₐ′ independently represents an oligonucleotide sequence comprising 0-25 nucleotides which are either modified or unmodified or combinations thereof, each sequence comprising at least two differently modified nucleotides;
[0188] each N_{b} and N_{b}′ independently represents an oligonucleotide sequence comprising 0-10 nucleotides which are either modified or unmodified or combinations thereof;
   [0189] XXX, YYY, ZZZ, X′X′X′, Y′Y′Y′, and Z′Z′Z′ each independently represent one motif of three identical modifications on three consecutive nucleotides, and wherein the modifications are 2′-O-methyl or 2′-fluoro modifications;
[0190] modifications on N_{b} differ from the modification on Y and modifications on N_{b}′ differ from the modification on Y′; and
[0191] wherein the sense strand is conjugated to at least one ligand, wherein the ligand is one or more GalNAc derivatives attached through a bivalent or trivalent branched linker.

[0192] In yet another aspect, the present invention provides double stranded RNAi agents capable of inhibiting the expression of Complement Component 3 (C3) in a cell. The agents include a sense strand complementary to an antisense strand, wherein the antisense strand comprises a region complementary to part of an mRNA encoding C3, wherein each strand is about 14 to about 30 nucleotides in length, wherein the double stranded RNAi agent is represented by formula (III):

sense: 5′nₚ-Nₐ-(X X X)ᵢ-N_{b}-Y Y Y-N_{b}-(Z Z Z)ⱼ-Nₐ-n_{q}3′

antisense: 3′nₚ′-Nₐ′-(X′X′X′)ₖ-N_{b}′-Y′Y′Y′-N_{b}′-(Z′Z′Z′)ₗ-Nₐ′-n_{q}′5′ (III)
[0193] wherein:
[0194] i, j, k, and l are each independently 0 or 1;
[0195] each nₚ, n_{q}, and n_{q}′, each of which may or may not be present, independently represents an overhang nucleotide;
   [0196] p, q, and q′ are each independently 0-6;
   [0197] nₚ′>0 and at least one nₚ′ is linked to a neighboring nucleotide via a phosphorothioate linkage;
[0198] each Nₐ and Nₐ′ independently represents an oligonucleotide sequence comprising 0-25 nucleotides which are either modified or unmodified or combinations thereof, each sequence comprising at least two differently modified nucleotides;
[0199] each N_{b} and N_{b}′ independently represents an oligonucleotide sequence comprising 0-10 nucleotides which are either modified or unmodified or combinations thereof;
   [0200] XXX, YYY, ZZZ, X′X′X′, Y′Y′Y′, and Z′Z′Z′ each independently represent one motif of three identical modifications on three consecutive nucleotides, and wherein the modifications are 2′-O-methyl or 2′-fluoro modifications;
[0201] modifications on N_{b} differ from the modification on Y and modifications on N_{b}′ differ from the modification on Y′;
[0202] wherein the sense strand comprises at least one phosphorothioate linkage; and
   [0203] wherein the sense strand is conjugated to at least one ligand, wherein the ligand is one or more GalNAc derivatives attached through a bivalent or trivalent branched linker.

[0204] In one aspect, the present invention provides double stranded RNAi agents capable of inhibiting the expression of Complement Component 3 (C3) in a cell. The agents include a sense strand complementary to an antisense strand, wherein the antisense strand comprises a region complementary to part of an mRNA encoding C3, wherein each strand is about 14 to about 30 nucleotides in length, wherein the double stranded RNAi agent is represented by formula (III):

sense: 5′nₚ-Nₐ-Y Y Y-Nₐ-n_{q}3′

antisense: 3′nₚ′-Nₐ′Y′Y′Y′-Nₐ′-n_{q}′5′ (IIIa)
[0205] wherein:
[0206] each nₚ, n_{q}, and n_{q}′, each of which may or may not be present, independently represents an overhang nucleotide;
   [0207] p, q, and q′ are each independently 0-6;
   [0208] nₚ′>0 and at least one nₚ′ is linked to a neighboring nucleotide via a phosphorothioate linkage;
[0209] each Nₐ and Nₐ′ independently represents an oligonucleotide sequence comprising 0-25 nucleotides which are either modified or unmodified or combinations thereof, each sequence comprising at least two differently modified nucleotides;
   [0210] YYY and Y′Y′Y′ each independently represent one motif of three identical modifications on three consecutive nucleotides, and wherein the modifications are 2′-O-methyl or 2′-fluoro modifications;
   [0211] wherein the sense strand comprises at least one phosphorothioate linkage; and
[0212] wherein the sense strand is conjugated to at least one ligand, wherein the ligand is one or more GalNAc derivatives attached through a bivalent or trivalent branched linker.

[0213] In another aspect, the present invention provides double stranded RNAi agents capable of inhibiting the expression of Complement Component 9 (C9) in a cell. The agents include a sense strand complementary to an antisense strand, wherein the antisense strand comprises a region complementary to part of an mRNA encoding C9, wherein each strand is about 14 to about 30 nucleotides in length, wherein the double stranded RNAi agent is represented by formula (III):

sense: 5′nₚ-Nₐ-(X X X)ᵢ-N_{b}-Y Y Y-N_{b}-(ZZZ)ⱼ-Nₐ-n_{q}3′

antisense: 3′nₚ′-Nₐ′-(X′X′X′)ₖ-N_{b}′-Y′Y′Y′-N_{b}′-(Z′Z′Z′)ₗ-Nₐ′-n_{q}′5′ (III)
[0214] wherein:
[0215] i, j, k, and l are each independently 0 or 1;
[0216] p, p′, q, and q′ are each independently 0-6;
[0217] each Nₐ and Nₐ′ independently represents an oligonucleotide sequence comprising 0-25 nucleotides which are either modified or unmodified or combinations thereof, each sequence comprising at least two differently modified nucleotides;
[0218] each N_{b} and N_{b}′ independently represents an oligonucleotide sequence comprising 0-10 nucleotides which are either modified or unmodified or combinations thereof;
   [0219] each nₚ, nₚ′, n_{q}, and n_{q}′, each of which may or may not be present independently represents an overhang nucleotide;
[0220] XXX, YYY, ZZZ, X′X′X′, Y′Y′Y′, and Z′Z′Z′ each independently represent one motif of three identical modifications on three consecutive nucleotides, and wherein the modifications are 2′-O-methyl or 2′-fluoro modifications;
[0221] modifications on N_{b} differ from the modification on Y and modifications on N_{b}′ differ from the modification on Y′; and
[0222] wherein the sense strand is conjugated to at least one ligand.

[0223] In one aspect, the invention provides double stranded RNAi agents capable of inhibiting the expression of Complement Component 9 (C9) in a cell. The agents include a sense strand complementary to an antisense strand, wherein the antisense strand comprises a region complementary to part of an mRNA encoding C9, wherein each strand is about 14 to about 30 nucleotides in length, wherein the double stranded RNAi agent is represented by formula (III):

sense: 5′nₚ-Nₐ-(X X X)ᵢ-N_{b}-Y Y Y-N_{b}-(ZZZ)ⱼ-Nₐ-n_{q}3′

antisense: 3′nₚ′-Nₐ′-(X′X′X′)ₖ-N_{b}′-Y′Y′Y′-N_{b}′-(Z′Z′Z′)ₗ-Nₐ′-n_{q}′5′ (III)
[0224] wherein:
[0225] i, j, k, and l are each independently 0 or 1;
[0226] each nₚ, n_{q}, and n_{q}′, each of which may or may not be present, independently represents an overhang nucleotide;
   [0227] p, q, and q′ are each independently 0-6;
   [0228] nₚ′>0 and at least one nₚ′ is linked to a neighboring nucleotide via a phosphorothioate linkage;
[0229] each Nₐ and Nₐ′ independently represents an oligonucleotide sequence comprising 0-25 nucleotides which are either modified or unmodified or combinations thereof, each sequence comprising at least two differently modified nucleotides;
[0230] each N_{b} and N_{b}′ independently represents an oligonucleotide sequence comprising 0-10 nucleotides which are either modified or unmodified or combinations thereof;
   [0231] XXX, YYY, ZZZ, X′X′X′, Y′Y′Y′, and Z′Z′Z′ each independently represent one motif of three identical modifications on three consecutive nucleotides, and wherein the modifications are 2′-O-methyl or 2′-fluoro modifications;
[0232] modifications on N_{b} differ from the modification on Y and modifications on N_{b}′ differ from the modification on Y′; and
[0233] wherein the sense strand is conjugated to at least one ligand.

[0234] In another aspect, the invention provides double stranded RNAi agents capable of inhibiting the expression of Complement Component 9 (C9) in a cell. The agents include a sense strand complementary to an antisense strand, wherein the antisense strand comprises a region complementary to part of an mRNA encoding C9, wherein each strand is about 14 to about 30 nucleotides in length, wherein the double stranded RNAi agent is represented by formula (III):

sense: 5′nₚ-Nₐ-(X X X)ᵢ-N_{b}-Y Y Y-N_{b}-(ZZZ)ⱼ-Nₐ-n_{q}3′

antisense: 3′nₚ′-Nₐ′-(X′X′X′)ₖ-N_{b}′-Y′Y′Y′-N_{b}′-(Z′Z′Z′)ₗ-Nₐ′-n_{q}′5′ (III)
[0235] wherein:
[0236] i, j, k, and l are each independently 0 or 1;
[0237] each nₚ, n_{q}, and n_{q}′, each of which may or may not be present, independently represents an overhang nucleotide;
   [0238] p, q, and q′ are each independently 0-6;
   [0239] nₚ′>0 and at least one nₚ′ is linked to a neighboring nucleotide via a phosphorothioate linkage;
[0240] each Nₐ and Nₐ′ independently represents an oligonucleotide sequence comprising 0-25 nucleotides which are either modified or unmodified or combinations thereof, each sequence comprising at least two differently modified nucleotides;
[0241] each N_{b} and N_{b}′ independently represents an oligonucleotide sequence comprising 0-10 nucleotides which are either modified or unmodified or combinations thereof;
   [0242] XXX, YYY, ZZZ, X′X′X′, Y′Y′Y′, and Z′Z′Z′ each independently represent one motif of three identical modifications on three consecutive nucleotides, and wherein the modifications are 2′-O-methyl or 2′-fluoro modifications;
[0243] modifications on N_{b} differ from the modification on Y and modifications on N_{b}′ differ from the modification on Y′; and
[0244] wherein the sense strand is conjugated to at least one ligand, wherein the ligand is one or more GalNAc derivatives attached through a bivalent or trivalent branched linker.

[0245] In another aspect, the invention provides double stranded RNAi agents capable of inhibiting the expression of Complement Component 9 (C9) in a cell. The agents include a sense strand complementary to an antisense strand, wherein the antisense strand comprises a region complementary to part of an mRNA encoding C9, wherein each strand is about 14 to about 30 nucleotides in length, wherein the double stranded RNAi agent is represented by formula (III):

sense: 5′nₚ-Nₐ-(X X X)ᵢ-N_{b}-Y Y Y-N_{b}-(Z Z Z)ⱼ-Nₐ-n_{q}3′

antisense: 3′nₚ′-Nₐ′-(X′X′X′)ₖ-N_{b}′-Y′Y′Y′-N_{b}′-(Z′Z′Z′)ₗ-Nₐ′-n_{q}′5′ (III)
[0246] wherein:
[0247] i, j, k, and l are each independently 0 or 1;
[0248] each nₚ, n_{q}, and n_{q}′, each of which may or may not be present, independently represents an overhang nucleotide;
   [0249] p, q, and q′ are each independently 0-6;
   [0250] nₚ′>0 and at least one nₚ′ is linked to a neighboring nucleotide via a phosphorothioate linkage;
[0251] each Nₐ and Nₐ′ independently represents an oligonucleotide sequence comprising 0-25 nucleotides which are either modified or unmodified or combinations thereof, each sequence comprising at least two differently modified nucleotides;
[0252] each N_{b} and N_{b}′ independently represents an oligonucleotide sequence comprising 0-10 nucleotides which are either modified or unmodified or combinations thereof;
   [0253] XXX, YYY, ZZZ, X′X′X′, Y′Y′Y′, and Z′Z′Z′ each independently represent one motif of three identical modifications on three consecutive nucleotides, and wherein the modifications are 2′-O-methyl or 2′-fluoro modifications;
[0254] modifications on N_{b} differ from the modification on Y and modifications on N_{b}′ differ from the modification on Y′;
[0255] wherein the sense strand comprises at least one phosphorothioate linkage; and
[0256] wherein the sense strand is conjugated to at least one ligand, wherein the ligand is one or more GalNAc derivatives attached through a bivalent or trivalent branched linker.

[0257] In a further aspect, the present invention provides double stranded RNAi agents capable of inhibiting the expression of Complement Component 9 (C9) in a cell. The agent include a sense strand complementary to an antisense strand, wherein the antisense strand comprises a region complementary to part of an mRNA encoding C9, wherein each strand is about 14 to about 30 nucleotides in length, wherein the double stranded RNAi agent is represented by formula (III):

sense: 5′nₚ-Nₐ-Y Y Y-Nₐ-n_{q}3′

antisense: 3′nₚ′-Nₐ′-Y′Y′Y′-Nₐ′-n_{q}′5′ (IIIa)
[0258] wherein:
[0259] each nₚ, n_{q}, and n_{q}′, each of which may or may not be present, independently represents an overhang nucleotide;
   [0260] p, q, and q′ are each independently 0-6;
   [0261] nₚ′>0 and at least one nₚ′ is linked to a neighboring nucleotide via a phosphorothioate linkage;
[0262] each Nₐ and Nₐ′ independently represents an oligonucleotide sequence comprising 0-25 nucleotides which are either modified or unmodified or combinations thereof, each sequence comprising at least two differently modified nucleotides;
   [0263] YYY and Y′Y′Y′ each independently represent one motif of three identical modifications on three consecutive nucleotides, and wherein the modifications are 2′-O-methyl or 2′-fluoro modifications;
   [0264] wherein the sense strand comprises at least one phosphorothioate linkage; and
[0265] wherein the sense strand is conjugated to at least one ligand, wherein the ligand is one or more GalNAc derivatives attached through a bivalent or trivalent branched linker.

[0266] In another aspect, the invention provides double stranded RNAi agents for inhibiting expression of complement factor B (CFB) in a cell, wherein the double stranded RNAi agent comprises a sense strand and an antisense strand forming a double stranded region, wherein the sense strand comprises at least 15 contiguous nucleotides differing by no more than 3 nucleotides from the nucleotide sequence of any one of SEQ ID NOs: 1-5, 27, and 30, and the antisense strand comprises at least 15 contiguous nucleotides differing by no more than 3 nucleotides from any one of the nucleotide sequence of SEQ ID NOs: 12-16, 33, and 36, wherein substantially all of the nucleotides of the sense strand comprise a modification selected from the group consisting of a 2′-O-methyl modification and a 2′-fluoro modification, wherein the sense strand comprises two phosphorothioate internucleotide linkages at the 5′-terminus, wherein substantially all of the nucleotides of the antisense strand comprise a modification selected from the group consisting of a 2′-O-methyl modification and a 2′-fluoro modification, wherein the antisense strand comprises two phosphorothioate internucleotide linkages at the 5′-terminus and two phosphorothioate internucleotide linkages at the 3′-terminus, and wherein the sense strand is conjugated to one or more GalNAc derivatives attached through a branched bivalent or trivalent linker at the 3′-terminus.

[0267] In another aspect, the present invention provides double stranded RNAi agents for inhibiting expression of complement component C3 in a cell, wherein the double stranded RNAi agent comprises a sense strand and an antisense strand forming a double stranded region, wherein the sense strand comprises at least 15 contiguous nucleotides differing by no more than 3 nucleotides from the nucleotide sequence of any one of SEQ ID NOs: 6-8, 28, and 31, and the antisense strand comprises at least 15 contiguous nucleotides differing by no more than 3 nucleotides from any one of the nucleotide sequence of SEQ ID NOs: 17-19, 34, and 37, wherein substantially all of the nucleotides of the sense strand comprise a modification selected from the group consisting of a 2′-O-methyl modification and a 2′-fluoro modification, wherein the sense strand comprises two phosphorothioate internucleotide linkages at the 5′-terminus, wherein substantially all of the nucleotides of the antisense strand comprise a modification selected from the group consisting of a 2′-O-methyl modification and a 2′-fluoro modification, wherein the antisense strand comprises two phosphorothioate internucleotide linkages at the 5′-terminus and two phosphorothioate internucleotide linkages at the 3′-terminus, and wherein the sense strand is conjugated to one or more GalNAc derivatives attached through a branched bivalent or trivalent linker at the 3′-terminus.

[0268] In yet another aspect, the present invention provides double stranded RNAi agents for inhibiting expression of complement component C9 in a cell, wherein the double stranded RNAi agent comprises a sense strand and an antisense strand forming a double stranded region, wherein the sense strand comprises at least 15 contiguous nucleotides differing by no more than 3 nucleotides from the nucleotide sequence of any one of SEQ ID NOs: 9-11, 29, and 32, and the antisense strand comprises at least 15 contiguous nucleotides differing by no more than 3 nucleotides from any one of the nucleotide sequence of SEQ ID NOs: 20-22, 35, and 38, wherein substantially all of the nucleotides of the sense strand comprise a modification selected from the group consisting of a 2′-O-methyl modification and a 2′-fluoro modification, wherein the sense strand comprises two phosphorothioate internucleotide linkages at the 5′-terminus, wherein substantially all of the nucleotides of the antisense strand comprise a modification selected from the group consisting of a 2′-O-methyl modification and a 2′-fluoro modification, wherein the antisense strand comprises two phosphorothioate internucleotide linkages at the 5′-terminus and two phosphorothioate internucleotide linkages at the 3′-terminus, and wherein the sense strand is conjugated to one or more GalNAc derivatives attached through a branched bivalent or trivalent linker at the 3′-terminus.

[0269] In one embodiment, all of the nucleotides of the sense strand and all of the nucleotides of the antisense strand comprise a modification.

[0270] In another aspect, the present invention provides cells containing the agents of the invention.

[0271] In one aspect, the invention provides vectors encoding at least one strand of the agents of the invention.

[0272] In another aspect, the invention provides cells comprising the vectors of the invention.

[0273] In one aspect, the present invention provides pharmaceutical compositions for inhibiting expression of a complement component factor B gene comprising the agents the invention.

[0274] In another aspect, the present invention provides pharmaceutical compositions for inhibiting expression of a complement component C3 gene comprising the agents of the invention.

[0275] In yet another aspect, the present invention provides pharmaceutical compositions for inhibiting expression of a complement component C9 gene comprising the agents of the invention.

[0276] In one embodiment, the RNAi agent is administered in an unbuffered solution.

[0277] In one embodiment, the unbuffered solution is saline or water.

[0278] In one embodiment, the RNAi agent is administered with a buffer solution.

[0279] In one embodiment, the buffer solution comprises acetate, citrate, prolamine, carbonate, or phosphate or any combination thereof.

[0280] In one embodiment, the buffer solution is phosphate buffered saline (PBS).

[0281] In one aspect, the present invention provides methods of inhibiting complement factor B (CFB) expression in a cell. The methods include contacting the cell with the agent of athe invention or a pharmaceutical composition of the invention, and maintaining the cell produced for a time sufficient to obtain degradation of the mRNA transcript of a CFB gene, thereby inhibiting expression of the CFB gene in the cell.

[0282] In another aspect, the present invention provides methods of inhibiting complement component 3 (C3) expression in a cell. The methods include contacting the cell with the agent of a the invention or a pharmaceutical composition of the invention, and maintaining the cell produced for a time sufficient to obtain degradation of the mRNA transcript of a C3 gene, thereby inhibiting expression of the C3 gene in the cell. In yet another aspect, the present invention provides methods of inhibiting complement component 9 (C9) expression in a cell. The methods include contacting the cell with the agent of athe invention or a pharmaceutical composition of the invention, and maintaining the cell produced for a time sufficient to obtain degradation of the mRNA transcript of a C9 gene, thereby inhibiting expression of the C9 gene in the cell.

[0283] In one embodiment, the cell is within a subject.

[0284] In one embodiment, the subject is a human.

[0285] In one embodiment, the human subject suffers from a complement component-associated disease.

[0286] In one embodiment, the complement component-associated disease is selected from the group consisting of paroxysmal nocturnal hemoglobinuria (PNH), asthma, rheumatoid arthritis, systemic lupus erythmatosis, glomerulonephritis, psoriasis, dermatomyositis bullous pemphigoid, atypical hemolytic uremic syndrome, Shiga toxin E. coli-related hemolytic uremic syndrome, myasthenia gravis, neuromyelistis optica, dense deposit disease, C3 neuropathy, age-related macular degeneration, cold agglutinin disease, anti-neutrophil cytoplasmic antibody-associated vasculitis, humoral and vascular transplant rejection, graft dysfunction, myocardial infarction, a sensitized recipient of a transplant, and sepsis.

[0287] In one embodiment, the complement component-associated disease is paroxysmal nocturnal hemoglobinuria (PNH).

[0288] In another embodiment, the complement component-associated disease is atypical hemolytic uremic syndrome (aHUS).

[0289] In one embodiment, the CFB expression is inhibited by at least about 30%.

[0290] In one embodiment, the C3 expression is inhibited by at least about 30%.

[0291] In one embodiment, the C9 expression is inhibited by at least about 30%.

[0292] In one embodiment, the agent is administered at a dose of about 0.01 mg/kg to about 10 mg/kg or about 0.5 mg/kg to about 50 mg/kg.

[0293] In another embodiment, the agent is administered at a dose of about 10 mg/kg to about 30 mg/kg.

[0294] In one embodiment, the agent is administered subcutaneously.

[0295] In another embodiment, the agent is administered intravenously.

[0296] In one aspect, the present invention provides methods of treating a subject having a disorder that would benefit from reduction in complement factor B (CFB) expression. The methods include administering to the subject a therapeutically effective amount of the agent of the invention, thereby treating the subject.

[0297] In another aspect, the present invention provides methods of preventing at least one symptom in a subject having a disease or disorder that would benefit from reduction in complement factor B (CFB) expression. The methods include administering to the subject a therapeutically effective amount of the agent of the invention, thereby preventing at least one symptom in the subject having a disorder that would benefit from reduction in CFB expression.

[0298] In yet another aspect, the present invention provides methods of treating a subject having a disorder that would benefit from reduction in complement component C3 (C3) expression. The methods include administering to the subject a therapeutically effective amount of the agent of the invention, thereby treating the subject.

[0299] In one aspect, the present invention provides methods of preventing at least one symptom in a subject having a disease or disorder that would benefit from reduction in complement component C3 (C3) expression. The methods include administering to the subject a therapeutically effective amount of the agent of the invention, thereby preventing at least one symptom in the subject having a disorder that would benefit from reduction in C3 expression.

[0300] In another aspect, the present invention provides methods of treating a subject having a disorder that would benefit from reduction in complement component C9 (C9) expression. The methods include administering to the subject a therapeutically effective amount of the agent of the invention, thereby treating the subject.

[0301] In one aspect, the present invention provides methods of preventing at least one symptom in a subject having a disease or disorder that would benefit from reduction in complement component C9 (C9) expression. The methods include administering to the subject a therapeutically effective amount of the agent of the invention, thereby preventing at least one symptom in the subject having a disorder that would benefit from reduction in C9 expression.

[0302] In one embodiment, the disorder is a complement component-associated disease.

[0303] In one embodiment, the complement component-associated disease is selected from the group consisting of paroxysmal nocturnal hemoglobinuria (PNH), asthma, rheumatoid arthritis, systemic lupus erythmatosis, glomerulonephritis, psoriasis, dermatomyositis bullous pemphigoid, atypical hemolytic uremic syndrome, Shiga toxin E. coli-related hemolytic uremic syndrome, myasthenia gravis, neuromyelistis optica, dense deposit disease, C3 neuropathy, age-related macular degeneration, cold agglutinin disease, anti-neutrophil cytoplasmic antibody-associated vasculitis, humoral and vascular transplant rejection, graft dysfunction, myocardial infarction, a sensitized recipient of a transplant, and sepsis.

[0304] In one embodiment, the complement component-associated disease is paroxysmal nocturnal hemoglobinuria (PNH).

[0305] In another embodiment, the complement component-associated disease is atypical hemolytic uremic syndrome (aHUS).

[0306] In one embodiment, the administration of the agent to the subject causes a decrease in hemolysis and/or a decrease in CFB protein accumulation.

[0307] In one embodiment, the administration of the agent to the subject causes a decrease in hemolysis and/or a decrease in C3 protein accumulation.

[0308] In one embodiment, the administration of the agent to the subject causes a decrease in hemolysis and/or a decrease in C9 protein accumulation.

[0309] In one embodiment, the methods further include administration of eculizumab to the subject.

[0310] In another embodiment, the methods further include administration of compstatin to the subject.

[0311] In one embodiment, the agent is administered at a dose of about 0.01 mg/kg to about 10 mg/kg or about 0.5 mg/kg to about 50 mg/kg.

[0312] In another embodiment, the agent is administered at a dose of about 10 mg/kg to about 30 mg/kg.

[0313] In yet another embodiment, the agent is administered at a dose selected from the group consisting of 0.5 mg/kg 1 mg/kg, 1.5 mg/kg, 3 mg/kg, 10 mg/kg, and 30 mg/kg.

[0314] In one embodiment, the agent is administered to the subject once a week.

[0315] In another embodiment, the agent is administered to the subject twice a month.

[0316] In one embodiment, the methods further include measuring LDH levels in the subject.

[0317] In one aspect, the present invention provides methods of inhibiting the expression of complement factor B (CFB) in a subject. The methods include administering to the subject a therapeutically effective amount of the agent of the invention, thereby inhibiting the expression of CFB in the subject.

[0318] In another aspect, the present invention provides methods of inhibiting the expression of complement component C3 (C3) in a subject. The methods include administering to the subject a therapeutically effective amount of the agent of the invention, thereby inhibiting the expression of C3 in the subject.

[0319] In yet another aspect, the present invention provides methods of inhibiting the expression of complement component C9 (C9) in a subject. The methods include administering to the subject a therapeutically effective amount of the agent of any one of the invention, thereby inhibiting the expression of C9 in the subject.

[0320] In one embodiment, the methods further include administering eculizumab to the subject.

[0321] In another embodiment, the methods further include administering compstatin to the subject.

[0322] In one embodiment, the agent is administered at a dose of about 0.01 mg/kg to about 10 mg/kg or about 0.5 mg/kg to about 50 mg/kg.

[0323] In another embodiment, the agent is administered at a dose of about 10 mg/kg to about 30 mg/kg.

[0324] In yet another embodiment, the agent is administered at a dose selected from the group consisting of 1 mg/kg, 3 mg/kg, 10 mg/kg, and 30 mg/kg.

[0325] In one embodiment, the agent is administered to the subject once a week.

[0326] In another embodiment, the dsRNA agent is administered to the subject twice a month.

### BRIEF DESCRIPTION OF THE DRAWINGS

[0327] FIG. 1 is a schematic of the three complement pathways: alternative, classical and lectin.

[0328] FIG. 2 is a graph showing the percentage of complement factor B (CFB) mRNA remaining in C57BL/6 mice 96 hours after a single 1 mg/kg or 10 mg/kg dose of the indicated iRNAs.

[0329] FIG. 3 is a graph showing the percentage of complement factor B (CFB) mRNA remaining in C57BL/6 mice 72 hours after a single 1.25 mg/kg, 2.5 mg/kg, or 10 mg/kg dose of AD-60331.

### DETAILED DESCRIPTION OF THE INVENTION

[0330] The present invention provides iRNA compositions, which effect the RNA-induced silencing complex (RISC)-mediated cleavage of RNA transcripts of a complement component gene, i.e., a CFB, C3, or C9 gene. The gene may be within a cell, e.g., a cell within a subject, such as a human.

[0331] The present invention also provides methods and combination therapies for treating a subject having a disorder that would benefit from inhibiting or reducing the expression of a CFB, C9, and/or C3 gene, e.g., a complement component-associated disease, such as paroxysmal nocturnal hemoglobinuria (PNH) and atypical hemolytic uremic syndrome (aHUS) using iRNA compositions which effect the RNA-induced silencing complex (RISC)-mediated cleavage of RNA transcripts of a CFB, C3, and/or C9 gene.

[0332] The present invention also provides methods for preventing at least one symptom, e.g., hemolysis, in a subject having a disorder that would benefit from inhibiting or reducing the expression of a CFB, C3, and/or C9 gene, e.g., a complement component-associated disease, such as paroxysmal nocturnal hemoglobinuria (PNH) and atypical hemolytic uremic syndrome (aHUS).

[0333] The iRNAs of the invention include an RNA strand (the antisense strand) having a region which is about 30 nucleotides or less in length, e.g., 15-30, 15-29, 15-28, 15-27, 15-26, 15-25, 15-24, 15-23, 15-22, 15-21, 15-20, 15-19, 15-18, 15-17, 18-30, 18-29, 18-28, 18-27, 18-26, 18-25, 18-24, 18-23, 18-22, 18-21, 18-20, 19-30, 19-29, 19-28, 19-27, 19-26, 19-25, 19-24, 19-23, 19-22, 19-21, 19-20, 20-30, 20-29, 20-28, 20-27, 20-26, 20-25, 20-24,20-23, 20-22, 20-21, 21-30, 21-29, 21-28, 21-27, 21-26, 21-25, 21-24, 21-23, or 21-22 nucleotides in length, which region is substantially complementary to at least part of an mRNA transcript of a CFB, C3, or C9 gene. The use of these iRNAs enables the targeted degradation of mRNAs of the corresponding gene (CFB, C3, or C9 gene) in mammals. Very low dosages of the iRNAs of the invention, in particular, can specifically and efficiently mediate RNA interference (RNAi), resulting in significant inhibition of expression of the corresponding gene (CFB, C3, or C9 gene). Using cell-based assays, the present inventors have demonstrated that iRNAs targeting these complement component genes can mediate RNAi, resulting in significant inhibition of expression of a complement gene (i.e., CFB, C3, or C9). Thus, methods and compositions including these iRNAs are useful for treating a subject having a complement component-associated disease, such as paroxysmal nocturnal hemoglobinuria (PNH) and atypical hemolytic uremic syndrome (aHUS).

[0334] The following detailed description discloses how to make and use compositions containing iRNAs to inhibit the expression of a complement gene (i.e., CFB, C3 or C9) as well as compositions, uses, and methods for treating subjects having diseases and disorders that would benefit from inhibition and/or reduction of the expression of these genes.

### I. Definitions

[0335] In order that the present invention may be more readily understood, certain terms are first defined. In addition, it should be noted that whenever a value or range of values of a parameter are recited, it is intended that values and ranges intermediate to the recited values are also intended to be part of this invention.

[0336] The articles “a” and “an” are used herein to refer to one or to more than one (i.e., to at least one) of the grammatical object of the article. By way of example, “an element” means one element or more than one element, e.g., a plurality of elements.

[0337] The term “including” is used herein to mean, and is used interchangeably with, the phrase “including but not limited to”.

[0338] The term “or” is used herein to mean, and is used interchangeably with, the term “and/or,” unless context clearly indicates otherwise.

[0339] As used herein, the term “Complement Factor B,” used interchangeably with the term “CFB,” refers to the well-known gene and polypeptide, also known in the art as AHUS, BF, CFAB, BFD, FB, GBG, FBI12, B-Factor, Properdin, H2-Bf, Glycine-Rich Beta Glycoprotein, C3 Proaccelerator, Properdin Factor 2B, C3 Proactivator, PBF2, Glycine-Rich Beta-Glycoprotein, C3/C5 Convertase, EC 3.4.21, and EC 3.4.21.473. The term “CFB” includes human CFB, the amino acid and nucleotide sequence of which may be found in, for example, GenBank Accession No. GI: 189181756; mouse CFB, the amino acid and nucleotide sequence of which may be found in, for example, GenBank Accession Nos. GI: 218156288 and GI: 218156290; rat CFB, the amino acid and nucleotide sequence of which may be found in, for example, GenBank Accession No. GI: 218156284; and chimpanzee CFB, the amino acid and nucleotide sequence of which may be found in, for example, GenBank Accession No. GI: 57114201. The term “CFB” also includes Macaca fascicularis CFB, the amino acid and nucleotide sequence of which may be found in, for example, GenBank Accession No. GI: 544428919 and in the entry for the gene, ENSMMUP00000000985 (locus=scaffold3881:47830:53620), in the Macaca genome project web site (http://macaque.genomics.org.cn/page/species/index.jsp). Additional examples of CFB mRNA sequences are readily available using, e.g., GenBank, UniProt, OMIM, and the Macaca genome project web site.

[0340] Exemplary CFB nucleotide sequences may also be found in SEQ ID NOs: 1-5, 27, and 30. SEQ ID NOs: 12-16, 33, and 36 are the antisense sequences of SEQ ID NOs: 1-5, 27, and 30, respectively.

[0341] The term “CFB,” as used herein, also refers to naturally occurring DNA sequence variations of the CFB gene. Non-limiting examples of sequence variations within the CFB gene include 1598A>G in exon 12, which results in a lysine being changed to an arginine at amino acid residue 533; 858C>G in exon 6, which results in a phenylalanine being changed to a leucine at amino acid residue 286; and 967A>G in exon 7, which results in a lysine being changed to an alanine at amino acid residue 323 (Tawadrous H. et al. (2010) Pediatr Nephrol. 25:947; Goicoechea de Jorge E et al. (2007) Proc Natl Acad Sci. USA 104:240). The term “CFB,” as used herein, also refers to single nucleotide polymorphisms in the CFB gene. Numerous sequence variations within the CFB gene have been identified and may be found at, for example, NCBI dbSNP and UniProt (see, e.g., ncbi.nlm.nih.gov/snp).

[0342] As used herein, the term “Complement Component 3,” used interchangeably with the term “C3,” refers to the well-known gene and polypeptide, also known in the art as ARMD9, C3a Anaphylatoxin, ASP, Complement Component C3a, C3a, Complement Component C3b, C3b, prepro-C3, Acylation-Stimulating Protein Cleavage Product, CPAMDI, Complement C3, C3 And PZP-Like Alpha-2-Macroglobulin Domain-Containing Protein 1, Complement Component C3, and AHUS5. The term “C3” includes human C3, the amino acid and nucleotide sequence of which may be found in, for example, GenBank Accession No. GI: 115298677; mouse C3, the amino acid and nucleotide sequence of which may be found in, for example, GenBank Accession No. GI: 126518316; and rat C3, the amino acid and nucleotide sequence of which may be found in, for example, GenBank Accession No. GI: 158138560. The term “C3” also includes Macaca fascicularis CFB, the amino acid and nucleotide sequence of which may be found in, for example, GenBank Accession No. GI: 544508182 and in the entry for the gene, ENSP00000245907 (locus=chr19:6921416:6963034), in the Macaca genome project web site (http://macaque.genomics.org.cn/page/species/index.jsp). Additional examples of C3 mRNA sequences are readily available using, e.g., GenBank, UniProt, OMIM, and the Macaca genome project web site.

[0343] Exemplary C3 nucleotide sequences may also be found in SEQ ID NOs: 6-8, 28, and 31. SEQ ID NOs: 17-19, 34, and 37 are the antisense sequences of SEQ ID NOs: 6-8, 28, and 31, respectively.

[0344] The term “C3,” as used herein, also refers to naturally occurring DNA sequence variations of the C3 gene. Numerous sequence variations within the C3 gene have been identified and may be found at, for example, NCBI dbSNP and UniProt (see, e.g., ncbi.nlm.nih.gov/snp).

[0345] As used herein, the term “Complement Component 9,” used interchangeably with the term “C9,” refers to the well-known gene and polypeptide. The term “C9” includes human C9, the amino acid and nucleotide sequence of which may be found in, for example, GenBank Accession No. GI: 187608340; mouse C9, the amino acid and nucleotide sequence of which may be found in, for example, GenBank Accession No. GI: 15375311; and rat C9, the amino acid and nucleotide sequence of which may be found in, for example, GenBank Accession No. GI: 16924005. The term “C9” also includes Macaca fascicularis CFB, the amino acid and nucleotide sequence of which may be found in, for example, GenBank Accession No. GI: 544436867 and in the entry for the gene, isotig05361 (isogroup03350 length=2955 numContigs=1), in the Macaca genome project web site (http://macaque genomics.org.en/page/species/index.jsp). Additional examples of C3 mRNA sequences are readily available using, e.g., GenBank, UniProt, OMIM, and the Macaca genome project web site.

[0346] Exemplary C9 nucleotide sequences may also be found in SEQ ID NOs: 9-11, 29, and 32. SEQ ID NOs: 20-22, 35, and 38 are the antisense sequences of SEQ ID NOs: 9-11, 29, and 32, respectively.

[0347] The term “C9,” as used herein, also refers to naturally occurring DNA sequence variations of the C9 gene. Numerous sequence variations within the C9 gene have been identified and may be found at, for example, NCBI dbSNP and UniProt (see, e.g., ncbi.nlm.nih.gov/snp).

[0348] As used herein, “target sequence” refers to a contiguous portion of the nucleotide sequence of an mRNA molecule formed during the transcription of a CFB, C3, or C9 gene, including mRNA that is a product of RNA processing of a primary transcription product. In one embodiment, the target portion of the sequence will be at least long enough to serve as a substrate for iRNA-directed cleavage at or near that portion of the nucleotide sequence of an mRNA molecule formed during the transcription of a CFB, C3, or C9 gene.

[0349] The target sequence may be from about 9-36 nucleotides in length, e.g., about 15-30 nucleotides in length. For example, the target sequence can be from about 15-30 nucleotides, 15-29, 15-28, 15-27, 15-26, 15-25, 15-24, 15-23, 15-22, 15-21, 15-20, 15-19, 15-18, 15-17, 18-30, 18-29, 18-28, 18-27, 18-26, 18-25, 18-24, 18-23, 18-22, 18-21, 18-20, 19-30, 19-29, 19-28, 19-27, 19-26, 19-25, 19-24, 19-23, 19-22, 19-21, 19-20, 20-30, 20-29, 20-28, 20-27, 20-26, 20-25, 20-24,20-23, 20-22, 20-21, 21-30, 21-29, 21-28, 21-27, 21-26, 21-25, 21-24, 21-23, or 21-22 nucleotides in length. Ranges and lengths intermediate to the above recited ranges and lengths are also contemplated to be part of the invention.

[0350] As used herein, the term “strand comprising a sequence” refers to an oligonucleotide comprising a chain of nucleotides that is described by the sequence referred to using the standard nucleotide nomenclature.

[0351] “G,” “C,” “A,” “T” and “U” each generally stand for a nucleotide that contains guanine, cytosine, adenine, thymidine and uracil as a base, respectively. However, it will be understood that the term “ribonucleotide” or “nucleotide” can also refer to a modified nucleotide, as further detailed below, or a surrogate replacement moiety (see, e.g., Table 2). The skilled person is well aware that guanine, cytosine, adenine, and uracil can be replaced by other moieties without substantially altering the base pairing properties of an oligonucleotide comprising a nucleotide bearing such replacement moiety. For example, without limitation, a nucleotide comprising inosine as its base can base pair with nucleotides containing adenine, cytosine, or uracil. Hence, nucleotides containing uracil, guanine, or adenine can be replaced in the nucleotide sequences of dsRNA featured in the invention by a nucleotide containing, for example, inosine. In another example, adenine and cytosine anywhere in the oligonucleotide can be replaced with guanine and uracil, respectively to form G-U Wobble base pairing with the target mRNA. Sequences containing such replacement moieties are suitable for the compositions and methods featured in the invention.

[0352] The terms “iRNA”, “RNAi agent,” “iRNA agent,”, “RNA interference agent” as used interchangeably herein, refer to an agent that contains RNA as that term is defined herein, and which mediates the targeted cleavage of an RNA transcript via an RNA-induced silencing complex (RISC) pathway. iRNA directs the sequence-specific degradation of mRNA through a process known as RNA interference (RNAi). The iRNA modulates, e.g., inhibits, the expression of the target gene in a cell, e.g., a cell within a subject, such as a mammalian subject.

[0353] In one embodiment, an RNAi agent of the invention includes a single stranded RNA that interacts with a target RNA sequence, e.g., a CFB, C3, or C9 target mRNA sequence, to direct the cleavage of the target RNA. Without wishing to be bound by theory it is believed that long double stranded RNA introduced into cells is broken down into siRNA by a Type III endonuclease known as Dicer (Sharp et al. (2001) Genes Dev. 15:485). Dicer, a ribonuclease-III-like enzyme, processes the dsRNA into 19-23 base pair short interfering RNAs with characteristic two base 3′ overhangs (Bernstein, et al., (2001) Nature 409:363). The siRNAs are then incorporated into an RNA-induced silencing complex (RISC) where one or more helicases unwind the siRNA duplex, enabling the complementary antisense strand to guide target recognition (Nykanen, et al., (2001) Cell 107:309). Upon binding to the appropriate target mRNA, one or more endonucleases within the RISC cleave the target to induce silencing (Elbashir, et al., (2001) Genes Dev. 15:188). Thus, in one aspect the invention relates to a single stranded RNA (siRNA) generated within a cell and which promotes the formation of a RISC complex to effect silencing of the target gene, i.e., a CFB, C3, or C9 gene. Accordingly, the term “siRNA” is also used herein to refer to an RNAi as described above.

[0354] In another embodiment, the RNAi agent may be a single-stranded siRNA that is introduced into a cell or organism to inhibit a target mRNA. Single-stranded RNAi agents bind to the RISC endonuclease, Argonaute 2, which then cleaves the target mRNA. The single-stranded siRNAs are generally 15-30 nucleotides and are chemically modified. The design and testing of single-stranded siRNAs are described in U.S. Pat. No. 8,101,348 and in Lima et al., (2012) (′el/150:883-894, the entire contents of each of which are hereby incorporated herein by reference. Any of the antisense nucleotide sequences described herein may be used as a single-stranded siRNA as described herein or as chemically modified by the methods described in Lima et al., (2012) Cell 150: 883-894.

[0355] In another embodiment, an “iRNA” for use in the compositions, uses, and methods of the invention is a double-stranded RNA and is referred to herein as a “double stranded RNAi agent,” “double-stranded RNA (dsRNA) molecule,” “dsRNA agent,” or “dsRNA”. The term “dsRNA”, refers to a complex of ribonucleic acid molecules, having a duplex structure comprising two anti-parallel and substantially complementary nucleic acid strands, referred to as having “sense” and “antisense” orientations with respect to a target RNA, i.e., a CFB, C3, or C9 gene. In some embodiments of the invention, a double-stranded RNA (dsRNA) triggers the degradation of a target RNA, e.g., an mRNA, through a post-transcriptional gene-silencing mechanism referred to herein as RNA interference or RNAi. In general, the majority of nucleotides of each strand of a dsRNA molecule are ribonucleotides, but as described in detail herein, each or both strands can also include one or more non-ribonucleotides, e.g., a deoxyribonucleotide and/or a modified nucleotide. In addition, as used in this specification, an “RNAi agent” may include ribonucleotides with chemical modifications; an RNAi agent may include substantial modifications at multiple nucleotides.

[0356] As used herein, the term “modified nucleotide” refers to a nucleotide having, independently, a modified sugar moiety, a modified internucleotide linkage, and/or a modified nucleobase. Thus, the term modified nucleotide encompasses substitutions, additions or removal of, e.g., a functional group or atom, to internucleoside linkages, sugar moieties, or nucleobases. The modifications suitable for use in the agents of the invention include all types of modifications disclosed herein or known in the art. Any such modifications, as used in a siRNA type molecule, are encompassed by “RNAi agent” for the purposes of this specification and claims.

[0357] The duplex region may be of any length that permits specific degradation of a desired target RNA through a RISC pathway, and may range from about 9 to 36 base pairs in length, e.g., about 15-30 base pairs in length, for example, about 9, 10, 11, 12, 13, 14, 15, 16, 17, 18, 19, 20, 21, 22, 23, 24, 25, 26, 27, 28, 29, 30, 31, 32, 33, 34, 35, or 36 base pairs in length, such as about 15-30, 15-29, 15-28, 15-27, 15-26, 15-25, 15-24, 15-23, 15-22, 15-21, 15-20, 15-19, 15-18, 15-17, 18-30, 18-29, 18-28, 18-27, 18-26, 18-25, 18-24, 18-23, 18-22, 18-21, 18-20, 19-30, 19-29, 19-28, 19-27, 19-26, 19-25, 19-24, 19-23, 19-22, 19-21, 19-20, 20-30, 20-29, 20-28, 20-27, 20-26, 20-25, 20-24,20-23, 20-22, 20-21, 21-30, 21-29, 21-28, 21-27, 21-26, 21-25, 21-24, 21-23, or 21-22 base pairs in length. Ranges and lengths intermediate to the above recited ranges and lengths are also contemplated to be part of the invention.

[0358] The two strands forming the duplex structure may be different portions of one larger RNA molecule, or they may be separate RNA molecules. Where the two strands are part of one larger molecule, and therefore are connected by an uninterrupted chain of nucleotides between the 3′-end of one strand and the 5′-end of the respective other strand forming the duplex structure, the connecting RNA chain is referred to as a “hairpin loop.” A hairpin loop can comprise at least one unpaired nucleotide. In some embodiments, the hairpin loop can comprise at least 2, at least 3, at least 4, at least 5, at least 6, at least 7, at least 8, at least 9, at least 10, at least 20, at least 23 or more unpaired nucleotides.

[0359] Where the two substantially complementary strands of a dsRNA are comprised of separate RNA molecules, those molecules need not, but can be covalently connected. Where the two strands are connected covalently by means other than an uninterrupted chain of nucleotides between the 3′-end of one strand and the 5′-end of the respective other strand forming the duplex structure, the connecting structure is referred to as a “linker.” The RNA strands may have the same or a different number of nucleotides. The maximum number of base pairs is the number of nucleotides in the shortest strand of the dsRNA minus any overhangs that are present in the duplex. In addition to the duplex structure, an RNAi may comprise one or more nucleotide overhangs.

[0360] As used herein, the term “nucleotide overhang” refers to at least one unpaired nucleotide that protrudes from the duplex structure of an iRNA, e.g., a dsRNA. For example, when a 3′-end of one strand of a dsRNA extends beyond the 5′-end of the other strand, or vice versa, there is a nucleotide overhang. A dsRNA can comprise an overhang of at least one nucleotide; alternatively the overhang can comprise at least two nucleotides, at least three nucleotides, at least four nucleotides, at least five nucleotides or more. A nucleotide overhang can comprise or consist of a nucleotide/nucleoside analog, including a deoxynucleotide/nucleoside. The overhang(s) can be on the sense strand, the antisense strand or any combination thereof. Furthermore, the nucleotide(s) of an overhang can be present on the 5′-end, 3′-end or both ends of either an antisense or sense strand of a dsRNA.

[0361] In one embodiment, the antisense strand of a dsRNA has a 1-10 nucleotide, e.g., a 1, 2, 3, 4, 5, 6, 7, 8, 9, or 10 nucleotide, overhang at the 3′-end and/or the 5′-end. In one embodiment, the sense strand of a dsRNA has a 1-10 nucleotide, e.g., a 1, 2, 3, 4, 5, 6, 7, 8, 9, or 10 nucleotide, overhang at the 3′-end and/or the 5′-end. In another embodiment, one or more of the nucleotides in the overhang is replaced with a nucleoside thiophosphate.

[0362] “Blunt” or “blunt end” means that there are no unpaired nucleotides at that end of the double stranded RNAi agent, i.e., no nucleotide overhang. A “blunt ended” RNAi agent is a dsRNA that is double-stranded over its entire length, i.e., no nucleotide overhang at either end of the molecule. The RNAi agents of the invention include RNAi agents with nucleotide overhangs at one end (i.e., agents with one overhang and one blunt end) or with nucleotide overhangs at both ends.

[0363] The term “antisense strand” or “guide strand” refers to the strand of an iRNA, e.g., a dsRNA, which includes a region that is substantially complementary to a target sequence, e.g., a CFB, C3, or C9 mRNA. As used herein, the term “region of complementarity” refers to the region on the antisense strand that is substantially complementary to a sequence, for example a target sequence, e.g., a CFB, C3, or C9 nucleotide sequence, as defined herein. Where the region of complementarity is not fully complementary to the target sequence, the mismatches can be in the internal or terminal regions of the molecule. Generally, the most tolerated mismatches are in the terminal regions, e.g., within 5, 4, 3, or 2 nucleotides of the 5′- and/or 3′-terminus of the iRNA.

[0364] The term “sense strand,” or “passenger strand” as used herein, refers to the strand of an iRNA that includes a region that is substantially complementary to a region of the antisense strand as that term is defined herein.

[0365] As used herein, the term “cleavage region” refers to a region that is located immediately adjacent to the cleavage site. The cleavage site is the site on the target at which cleavage occurs. In some embodiments, the cleavage region comprises three bases on either end of, and immediately adjacent to, the cleavage site. In some embodiments, the cleavage region comprises two bases on either end of, and immediately adjacent to, the cleavage site. In some embodiments, the cleavage site specifically occurs at the site bound by nucleotides 10 and 11 of the antisense strand, and the cleavage region comprises nucleotides 11, 12 and 13.

[0366] As used herein, and unless otherwise indicated, the term “complementary,” when used to describe a first nucleotide sequence in relation to a second nucleotide sequence, refers to the ability of an oligonucleotide or polynucleotide comprising the first nucleotide sequence to hybridize and form a duplex structure under certain conditions with an oligonucleotide or polynucleotide comprising the second nucleotide sequence, as will be understood by the skilled person. Such conditions can, for example, be stringent conditions, where stringent conditions can include: 400 mM NaCl, 40 mM PIPES pH 6.4, 1 mM EDTA, 50° C. or 70° C. for 12-16 hours followed by washing (see, e.g., “Molecular Cloning: A Laboratory Manual, Sambrook, et al. (1989) Cold Spring Harbor Laboratory Press). Other conditions, such as physiologically relevant conditions as can be encountered inside an organism, can apply. The skilled person will be able to determine the set of conditions most appropriate for a test of complementarity of two sequences in accordance with the ultimate application of the hybridized nucleotides.

[0367] Complementary sequences within an iRNA, e.g., within a dsRNA as described herein, include base-pairing of the oligonucleotide or polynucleotide comprising a first nucleotide sequence to an oligonucleotide or polynucleotide comprising a second nucleotide sequence over the entire length of one or both nucleotide sequences. Such sequences can be referred to as “fully complementary” with respect to each other herein. However, where a first sequence is referred to as “substantially complementary” with respect to a second sequence herein, the two sequences can be fully complementary, or they can form one or more, but generally not more than 5, 4, 3 or 2 mismatched base pairs upon hybridization for a duplex up to 30 base pairs, while retaining the ability to hybridize under the conditions most relevant to their ultimate application, e.g., inhibition of gene expression via a RISC pathway. However, where two oligonucleotides are designed to form, upon hybridization, one or more single stranded overhangs, such overhangs shall not be regarded as mismatches with regard to the determination of complementarity. For example, a dsRNA comprising one oligonucleotide 21 nucleotides in length and another oligonucleotide 23 nucleotides in length, wherein the longer oligonucleotide comprises a sequence of 21 nucleotides that is fully complementary to the shorter oligonucleotide, can yet be referred to as “fully complementary” for the purposes described herein.

[0368] “Complementary” sequences, as used herein, can also include, or be formed entirely from, non-Watson-Crick base pairs and/or base pairs formed from non-natural and modified nucleotides, in so far as the above requirements with respect to their ability to hybridize are fulfilled. Such non-Watson-Crick base pairs include, but are not limited to, G: U Wobble or Hoogstein base pairing.

[0369] The terms “complementary,” “fully complementary” and “substantially complementary” herein can be used with respect to the base matching between the sense strand and the antisense strand of a dsRNA, or between the antisense strand of an iRNA agent and a target sequence, as will be understood from the context of their use.

[0370] As used herein, a polynucleotide that is “substantially complementary to at least part of” a messenger RNA (mRNA) refers to a polynucleotide that is substantially complementary to a contiguous portion of the mRNA of interest (e.g., an mRNA encoding CFB, C3, or C9). For example, a polynucleotide is complementary to at least a part of a CFB mRNA if the sequence is substantially complementary to a non-interrupted portion of an mRNA encoding CFB.

[0371] In general, the majority of nucleotides of each strand are ribonucleotides, but as described in detail herein, each or both strands can also include one or more non-ribonucleotides, e.g., a deoxyribonucleotide and/or a modified nucleotide. In addition, an “iRNA” may include ribonucleotides with chemical modifications. Such modifications may include all types of modifications disclosed herein or known in the art. Any such modifications, as used in an iRNA molecule, are encompassed by “iRNA” for the purposes of this specification and claims.

[0372] In one aspect of the invention, an agent for use in the methods and compositions of the invention is a single-stranded antisense RNA molecule that inhibits a target mRNA via an antisense inhibition mechanism. The single-stranded antisense RNA molecule is complementary to a sequence within the target mRNA. The single-stranded antisense oligonucleotides can inhibit translation in a stoichiometric manner by base pairing to the mRNA and physically obstructing the translation machinery, see Dias, N. et al., (2002) Mol Cancer Ther 1:347-355. The single-stranded antisense RNA molecule may be about 15 to about 30 nucleotides in length and have a sequence that is complementary to a target sequence. For example, the single-stranded antisense RNA molecule may comprise a sequence that is at least about 15, 16, 17, 18, 19, 20, or more contiguous nucleotides from any one of the antisense sequences described herein.

[0373] The phrase “contacting a cell with an RNAi agent,” such as a dsRNA, as used herein, includes contacting a cell by any possible means. Contacting a cell with an RNAi agent includes contacting a cell in vitro with the iRNA or contacting a cell in vivo with the iRNA. The contacting may be done directly or indirectly. Thus, for example, the RNAi agent may be put into physical contact with the cell by the individual performing the method, or alternatively, the RNAi agent may be put into a situation that will permit or cause it to subsequently come into contact with the cell.

[0374] Contacting a cell in vitro may be done, for example, by incubating the cell with the RNAi agent. Contacting a cell in vivo may be done, for example, by injecting the RNAi agent into or near the tissue where the cell is located, or by injecting the RNAi agent into another area, e.g., the bloodstream or the subcutaneous space, such that the agent will subsequently reach the tissue where the cell to be contacted is located. For example, the RNAi agent may contain and/or be coupled to a ligand, e.g., GalNAc3, that directs the RNAi agent to a site of interest, e.g., the liver. Combinations of in vitro and in vivo methods of contacting are also possible. For example, a cell may also be contacted in vitro with an RNAi agent and subsequently transplanted into a subject.

[0375] As used herein, a “subject” is an animal, such as a mammal, including a primate (such as a human, a non-human primate, e.g., a monkey, and a chimpanzee), a non-primate (such as a cow, a pig, a camel, a llama, a horse, a goat, a rabbit, a sheep, a hamster, a guinea pig, a cat, a dog, a rat, a mouse, a horse, and a whale), or a bird (e.g., a duck or a goose). In an embodiment, the subject is a human, such as a human being treated or assessed for a disease, disorder or condition that would benefit from reduction in CFB, C3, and/or C9 expression; a human at risk for a disease, disorder or condition that would benefit from reduction in CFB, C3, and/or C9 expression; a human having a disease, disorder or condition that would benefit from reduction in CFB, C3, and/or C9 expression; and/or human being treated for a disease, disorder or condition that would benefit from reduction in CFB, C3, and/or C9 expression as described herein.

[0376] As used herein, the term “complement component-associated disease” is a disease or disorder that is caused by, or associated with complement activation. The term “complement component-associated disease” includes a disease, disorder or condition that would benefit from reduction in CFB (i.e., a “CFB-associated disease”), C3 (i.e., a “C3-associated disease”), and/or C9 (i.e., a “C9-associated disease”) expression. Such diseases are typically associated with inflammation and/or immune system activation, e.g., membrane attack complex-mediated lysis, anaphylaxis, and/or hemolysis. Non-limiting examples of complement component-associated diseases include paroxysmal nocturnal hemoglobinuria (PNH), atypical hemolytic uremic syndrome (aHUS), asthma, rheumatoid arthritis (RA); antiphospholipid antibody syndrome; lupus nephritis; ischemia-reperfusion injury; typical or infectious hemolytic uremic syndrome (tHUS); dense deposit disease (DDD); neuromyelitis optica (NMO); multifocal motor neuropathy (MMN); multiple sclerosis (MS); macular degeneration (e.g., age-related macular degeneration (AMD)); hemolysis, elevated liver enzymes, and low platelets (HELLP) syndrome; thrombotic thrombocytopenia purpura (TTP); spontaneous fetal loss; Pauci-immune vasculitis; epidermolysis bullosa; recurrent fetal loss; pre-eclampsia, traumatic brain injury, myasthenia gravis, cold agglutinin disease, dermatomyositis bullous pemphigoid, Shiga toxin E. coli-related hemolytic uremic syndrome, C3 neuropathy, anti-neutrophil cytoplasmic antibody-associated vasculitis (e.g., granulomatosis with polyangiitis (previously known as Wegener granulomatosis), Churg-Strauss syndrome, and microscopic polyangiitis), humoral and vascular transplant rejection, graft dysfunction, myocardial infarction (e.g., tissue damage and ischemia in myocardial infarction), an allogenic transplant, sepsis (e.g., poor outcome in sepsis), Coronary artery disease, dermatomyositis, Graves' disease, atherosclerosis, Alzheimer's disease, systemic inflammatory response sepsis, septic shock, spinal cord injury, glomerulonephritis, Hashimoto's thyroiditis, type I diabetes, psoriasis, pemphigus, autoimmune hemolytic anemia (AIHA), ITP, Goodpasture syndrome, Degos disease, antiphospholipid syndrome (APS), catastrophic APS (CAPS), a cardiovascular disorder, myocarditis, a cerebrovascular disorder, a peripheral (e.g., musculoskeletal) vascular disorder, a renovascular disorder, a mesenteric/enteric vascular disorder, vasculitis, Henoch-Schönlein purpura nephritis, systemic lupus erythematosus-associated vasculitis, vasculitis associated with rheumatoid arthritis, immune complex vasculitis, Takayasu's disease, dilated cardiomyopathy, diabetic angiopathy, Kawasaki's disease (arteritis), venous gas embolus (VGE), and restenosis following stent placement, rotational atherectomy, and percutaneous transluminal coronary angioplasty (PTCA) (see, e.g., Holers (2008) Immunological Reviews 223:300-316; Holers and Thurman (2004) Molecular Immunology 41:147-152; U.S. Patent Publication No. 20070172483).

[0377] In one embodiment, a complement component-associated disease is paroxysmal nocturnal hemoglobinuria (PNH). The PNH may be classical PNH or PNH in the setting of another bone marrow failure syndrome and/or myelodysplastic syndromes (MDS), e.g., cytopenias. In another embodiment, a complement component-associated disease is atypical hemolytic uremic syndrome (aHUS). In yet another embodiment, a complement component-associated disease is rheumatoid arthritis.

[0378] “Therapeutically effective amount,” as used herein, is intended to include the amount of an RNAi agent that, when administered to a subject having a complement component-associated disease, is sufficient to effect treatment of the disease (e.g., by diminishing, ameliorating or maintaining the existing disease or one or more symptoms of disease). The “therapeutically effective amount” may vary depending on the RNAi agent or antibody, or antigen-binding fragment thereof, how the agent is administered, the disease and its severity and the history, age, weight, family history, genetic makeup, the types of preceding or concomitant treatments, if any, and other individual characteristics of the subject to be treated.

[0379] “Prophylactically effective amount,” as used herein, is intended to include the amount of an iRNA agent that, when administered to a subject having a complement component-associate disease but not yet (or currently) experiencing or displaying symptoms of the disease, and/or a subject at risk of developing a complement component-associated disease, e.g., a subject having a graft and/or transplant, e.g., a sensitized or allogenic recipient, a subject having sepsis, and/or a subject having a myocardial infarction, is sufficient to prevent or ameliorate the disease or one or more symptoms of the disease. Ameliorating the disease includes slowing the course of the disease or reducing the severity of later-developing disease. The “prophylactically effective amount” may vary depending on the iRNA agent, how the agent is administered, the degree of risk of disease, and the history, age, weight, family history, genetic makeup, the types of preceding or concomitant treatments, if any, and other individual characteristics of the patient to be treated.

[0380] A “therapeutically effective amount” or “prophylactically effective amount” also includes an amount of an RNAi agent that produces some desired local or systemic effect at a reasonable benefit/risk ratio applicable to any treatment. iRNA agents employed in the methods of the present invention may be administered in a sufficient amount to produce a reasonable benefit/risk ratio applicable to such treatment.

[0381] The term “sample,” as used herein, includes a collection of similar fluids, cells, or tissues isolated from a subject, as well as fluids, cells, or tissues present within a subject. Examples of biological fluids include blood, serum and serosal fluids, plasma, urine, lymph, cerebrospinal fluid, ocular fluids, saliva, and the like. Tissue samples may include samples from tissues, organs or localized regions. For example, samples may be derived from particular organs, parts of organs, or fluids or cells within those organs. In certain embodiments, samples may be derived from the liver (e.g., whole liver or certain segments of liver or certain types of cells in the liver, such as, e.g., hepatocytes). In preferred embodiments, a “sample derived from a subject” refers to blood or plasma drawn from the subject. In further embodiments, a “sample derived from a subject” refers to liver tissue (or subcomponents thereof) derived from the subject.

### II. iRNAs of the Invention

[0382] The present invention provides iRNAs which inhibit the expression of a complement component gene. In one embodiment, the iRNA agent includes double-stranded ribonucleic acid (dsRNA) molecules for inhibiting the expression of a CFB gene in a cell, such as a cell within a subject, e.g., a mammal, such as a human having a complement component-associated disease as described herein, e.g., PNH. In another embodiment, the iRNA agent includes double-stranded ribonucleic acid (dsRNA) molecules for inhibiting the expression of a C3 gene in a cell, such as a cell within a subject, e.g., a mammal, such as a human having a complement component-associated disease as described herein, e.g., PNH. In a further embodiment, the iRNA agent includes double-stranded ribonucleic acid (dsRNA) molecules for inhibiting the expression of a C9 gene in a cell, such as a cell within a subject, e.g., a mammal, such as a human having a complement component-associated disease as described herein, e.g., PNH. The dsRNA includes an antisense strand having a region of complementarity which is complementary to at least a part of an mRNA formed in the expression of a target gene, i.e., CFB, C3, or C9 gene. The region of complementarity is about 30 nucleotides or less in length (e.g., about 30, 29, 28, 27, 26, 25, 24, 23, 22, 21, 20, 19, or 18 nucleotides or less in length). Upon contact with a cell expressing the target gene, the iRNA inhibits the expression of the target gene (e.g., a human, a primate, a non-primate, or a bird CFB, C3, or C9 gene) by at least about 10% as assayed by, for example, a PCR or branched DNA (bDNA)-based method, or by a protein-based method, such as by immunofluorescence analysis, using, for example, Western Blotting or flowcytometric techniques.

[0383] A dsRNA includes two RNA strands that are complementary and hybridize to form a duplex structure under conditions in which the dsRNA will be used. One strand of a dsRNA (the antisense strand) includes a region of complementarity that is substantially complementary, and generally fully complementary, to a target sequence. The target sequence can be derived from the sequence of an mRNA formed during the expression of a CFB, C3, or C9 gene. The other strand (the sense strand) includes a region that is complementary to the antisense strand, such that the two strands hybridize and form a duplex structure when combined under suitable conditions. As described elsewhere herein and as known in the art, the complementary sequences of a dsRNA can also be contained as self-complementary regions of a single nucleic acid molecule, as opposed to being on separate oligonucleotides.

[0384] Generally, the duplex structure is between 15 and 30 base pairs in length, e.g., between, 15-29, 15-28, 15-27, 15-26, 15-25, 15-24, 15-23, 15-22, 15-21, 15-20, 15-19, 15-18, 15-17, 18-30, 18-29, 18-28, 18-27, 18-26, 18-25, 18-24, 18-23, 18-22, 18-21, 18-20, 19-30, 19-29, 19-28, 19-27, 19-26, 19-25, 19-24, 19-23, 19-22, 19-21, 19-20, 20-30, 20-29, 20-28, 20-27, 20-26, 20-25, 20-24,20-23, 20-22, 20-21, 21-30, 21-29, 21-28, 21-27, 21-26, 21-25, 21-24, 21-23, or 21-22 base pairs in length. Ranges and lengths intermediate to the above recited ranges and lengths are also contemplated to be part of the invention.

[0385] Similarly, the region of complementarity to the target sequence is between 15 and 30 nucleotides in length, e.g., between 15-29, 15-28, 15-27, 15-26, 15-25, 15-24, 15-23, 15-22, 15-21, 15-20, 15-19, 15-18, 15-17, 18-30, 18-29, 18-28, 18-27, 18-26, 18-25, 18-24, 18-23, 18-22, 18-21, 18-20, 19-30, 19-29, 19-28, 19-27, 19-26, 19-25, 19-24, 19-23, 19-22, 19-21, 19-20, 20-30, 20-29, 20-28, 20-27, 20-26, 20-25, 20-24,20-23, 20-22, 20-21, 21-30, 21-29, 21-28, 21-27, 21-26, 21-25, 21-24, 21-23, or 21-22 nucleotides in length. Ranges and lengths intermediate to the above recited ranges and lengths are also contemplated to be part of the invention.

[0386] In some embodiments, the dsRNA is between about 15 and about 20 nucleotides in length, or between about 25 and about 30 nucleotides in length. In one embodiment, an RNAi agent of the invention is a dsRNA of 24-30 nucleotides that interacts with a target RNA sequence, i.e., a CFB, C3, or C9 target mRNA sequence, to direct the cleavage of the target RNA. In general, the dsRNA is long enough to serve as a substrate for the Dicer enzyme. For example, it is well-known in the art that dsRNAs longer than about 21-23 nucleotides in length may serve as substrates for Dicer. As the ordinarily skilled person will also recognize, the region of an RNA targeted for cleavage will most often be part of a larger RNA molecule, often an mRNA molecule. Where relevant, a “part” of an mRNA target is a contiguous sequence of an mRNA target of sufficient length to allow it to be a substrate for RNAi-directed cleavage (i.e., cleavage through a RISC pathway).

[0387] One of skill in the art will also recognize that the duplex region is a primary functional portion of a dsRNA, e.g., a duplex region of about 9 to 36 base pairs, e.g., about 10-36, 11-36, 12-36, 13-36, 14-36, 15-36, 9-35, 10-35, 11-35, 12-35, 13-35, 14-35, 15-35, 9-34, 10-34, 11-34, 12-34, 13-34, 14-34, 15-34, 9-33, 10-33, 11-33, 12-33, 13-33, 14-33, 15-33, 9-32, 10-32, 11-32, 12-32, 13-32, 14-32, 15-32, 9-31, 10-31, 11-31, 12-31, 13-32, 14-31, 15-31, 15-30, 15-29, 15-28, 15-27, 15-26, 15-25, 15-24, 15-23, 15-22, 15-21, 15-20, 15-19, 15-18, 15-17, 18-30, 18-29, 18-28, 18-27, 18-26, 18-25, 18-24, 18-23, 18-22, 18-21, 18-20, 19-30, 19-29, 19-28, 19-27, 19-26, 19-25, 19-24, 19-23, 19-22, 19-21, 19-20, 20-30, 20-29, 20-28, 20-27, 20-26, 20-25, 20-24,20-23, 20-22, 20-21, 21-30, 21-29, 21-28, 21-27, 21-26, 21-25, 21-24, 21-23, or 21-22 base pairs. Thus, in one embodiment, to the extent that it becomes processed to a functional duplex, of e.g., 15-30 base pairs, that targets a desired RNA for cleavage, an RNA molecule or complex of RNA molecules having a duplex region greater than 30 base pairs is a dsRNA. Thus, an ordinarily skilled artisan will recognize that in one embodiment, a miRNA is a dsRNA. In another embodiment, a dsRNA is not a naturally occurring miRNA. In another embodiment, an iRNA agent useful to target CFB, C3, or C9 expression is not generated in the target cell by cleavage of a larger dsRNA.

[0388] A dsRNA as described herein can further include one or more single-stranded nucleotide overhangs e.g., 1, 2, 3, or 4 nucleotides. dsRNAs having at least one nucleotide overhang can have unexpectedly superior inhibitory properties relative to their blunt-ended counterparts. A nucleotide overhang can comprise or consist of a nucleotide/nucleoside analog, including a deoxynucleotide/nucleoside. The overhang(s) can be on the sense strand, the antisense strand or any combination thereof. Furthermore, the nucleotide(s) of an overhang can be present on the 5′-end, 3′-end or both ends of either an antisense or sense strand of a dsRNA.

[0389] A dsRNA can be synthesized by standard methods known in the art as further discussed below, e.g., by use of an automated DNA synthesizer, such as are commercially available from, for example, Biosearch, Applied Biosystems, Inc.

[0390] iRNA compounds of the invention may be prepared using a two-step procedure. First, the individual strands of the double-stranded RNA molecule are prepared separately. Then, the component strands are annealed. The individual strands of the siRNA compound can be prepared using solution-phase or solid-phase organic synthesis or both. Organic synthesis offers the advantage that the oligonucleotide strands comprising unnatural or modified nucleotides can be easily prepared. Single-stranded oligonucleotides of the invention can be prepared using solution-phase or solid-phase organic synthesis or both.

[0391] In one aspect, a dsRNA of the invention includes at least two nucleotide sequences, a sense sequence and an anti-sense sequence.

[0392] In one embodiment, a dsRNA of the invention targeting CFB includes a sense strand selected from the group of sequences provided in any one of Tables 3 and 4, and the corresponding antisense strand of the sense strand is selected from the group of sequences of any one of Tables 3 and 4. In this aspect, one of the two sequences is complementary to the other of the two sequences, with one of the sequences being substantially complementary to a sequence of an mRNA generated in the expression of a CFB gene. As such, in this aspect, a dsRNA will include two oligonucleotides, where one oligonucleotide is described as the sense strand in any one of Tables 3 and 4, and the second oligonucleotide is described as the corresponding antisense strand of the sense strand in any one of Tables 3 and 4. In one embodiment, the substantially complementary sequences of the dsRNA are contained on separate oligonucleotides. In another embodiment, the substantially complementary sequences of the dsRNA are contained on a single oligonucleotide.

[0393] In one embodiment, a dsRNA of the invention targeting C3 includes a sense strand selected from the group of sequences provided in any one of Tables 5 and 6, and the corresponding antisense strand of the sense strand is selected from the group of sequences of any one of Tables 5 and 6. In this aspect, one of the two sequences is complementary to the other of the two sequences, with one of the sequences being substantially complementary to a sequence of an mRNA generated in the expression of a C3 gene. As such, in this aspect, a dsRNA will include two oligonucleotides, where one oligonucleotide is described as the sense strand in any one of Tables 5 and 6, and the second oligonucleotide is described as the corresponding antisense strand of the sense strand in any one of Tables 5 and 6. In one embodiment, the substantially complementary sequences of the dsRNA are contained on separate oligonucleotides. In another embodiment, the substantially complementary sequences of the dsRNA are contained on a single oligonucleotide.

[0394] In one embodiment, a dsRNA of the invention targeting C9 includes a sense strand selected from the group of sequences provided in any one of Tables 7 and 8, and the corresponding antisense strand of the sense strand is selected from the group of sequences of any one of Tables 7 and 8. In this aspect, one of the two sequences is complementary to the other of the two sequences, with one of the sequences being substantially complementary to a sequence of an mRNA generated in the expression of a C9 gene. As such, in this aspect, a dsRNA will include two oligonucleotides, where one oligonucleotide is described as the sense strand in any one of Tables 7 and 8, and the second oligonucleotide is described as the corresponding antisense strand of the sense strand in any one of Tables 7 and 8. In one embodiment, the substantially complementary sequences of the dsRNA are contained on separate oligonucleotides. In another embodiment, the substantially complementary sequences of the dsRNA are contained on a single oligonucleotide.

[0395] It will be understood that, although some of the sequences in Tables 3-8 are described as modified and/or conjugated sequences, the RNA of the iRNA of the invention e.g., a dsRNA of the invention, may comprise any one of the sequences set forth in Tables 3-8 that is un-modified, un-conjugated, and/or modified and/or conjugated differently than described therein.

[0396] The skilled person is well aware that dsRNAs having a duplex structure of between about 20 and 23 base pairs, e.g., 21, base pairs have been hailed as particularly effective in inducing RNA interference (Elbashir et al., EMBO 2001, 20:6877-6888). However, others have found that shorter or longer RNA duplex structures can also be effective (Chu and Rana (2007) RNA 14:1714-1719; Kim et al. (2005) Nat Biotech 23:222-226). In the embodiments described above, by virtue of the nature of the oligonucleotide sequences provided in any one of Tables 3-8 dsRNAs described herein can include at least one strand of a length of minimally 21 nucleotides. It can be reasonably expected that shorter duplexes having one of the sequences of any one of Tables 3-8 minus only a few nucleotides on one or both ends can be similarly effective as compared to the dsRNAs described above. Hence, dsRNAs having a sequence of at least 15, 16, 17, 18, 19, 20, or more contiguous nucleotides derived from one of the sequences of any one of Tables 3-8, and differing in their ability to inhibit the expression of the taret gene by not more than about 5, 10, 15, 20, 25, or 30% inhibition from a dsRNA comprising the full sequence, are contemplated to be within the scope of the present invention.

[0397] In addition, the RNAs provided in any one of Tables 3 and 4 identify a site(s) in a CFB transcript that is susceptible to RISC-mediated cleavage. Similarly, the RNAs provided in any one of Tables 5 and 6 identify a site(s) in a C3 transcript that is susceptible to RISC-mediated cleavage, and the RNAs provided in any one of Tables 7 and 8 identify a site(s) in a C9 transcript that is susceptible to RISC-mediated cleavage. As such, the present invention further features iRNAs that target within one of these sites. As used herein, an iRNA is said to target within a particular site of an RNA transcript if the iRNA promotes cleavage of the transcript anywhere within that particular site. Such an iRNA will generally include at least about 15 contiguous nucleotides from one of the sequences provided in any one of Tables 3-8 coupled to additional nucleotide sequences taken from the region contiguous to the selected sequence in the target gene.

[0398] While a target sequence is generally about 15-30 nucleotides in length, there is wide variation in the suitability of particular sequences in this range for directing cleavage of any given target RNA. Various software packages and the guidelines set out herein provide guidance for the identification of optimal target sequences for any given gene target, but an empirical approach can also be taken in which a “window” or “mask” of a given size (as a non-limiting example, 21 nucleotides) is literally or figuratively (including, e.g., in silico) placed on the target RNA sequence to identify sequences in the size range that can serve as target sequences. By moving the sequence “window” progressively one nucleotide upstream or downstream of an initial target sequence location, the next potential target sequence can be identified, until the complete set of possible sequences is identified for any given target size selected. This process, coupled with systematic synthesis and testing of the identified sequences (using assays as described herein or as known in the art) to identify those sequences that perform optimally can identify those RNA sequences that, when targeted with an iRNA agent, mediate the best inhibition of target gene expression. Thus, while the sequences identified, for example, in any one of Tables 3-8 represent effective target sequences, it is contemplated that further optimization of inhibition efficiency can be achieved by progressively “walking the window” one nucleotide upstream or downstream of the given sequences to identify sequences with equal or better inhibition characteristics.

[0399] Further, it is contemplated that for any sequence identified, e.g., in any one of Tables 3-8, further optimization could be achieved by systematically either adding or removing nucleotides to generate longer or shorter sequences and testing those sequences generated by walking a window of the longer or shorter size up or down the target RNA from that point. Again, coupling this approach to generating new candidate targets with testing for effectiveness of iRNAs based on those target sequences in an inhibition assay as known in the art and/or as described herein can lead to further improvements in the efficiency of inhibition. Further still, such optimized sequences can be adjusted by, e.g., the introduction of modified nucleotides as described herein or as known in the art, addition or changes in overhang, or other modifications as known in the art and/or discussed herein to further optimize the molecule (e.g., increasing serum stability or circulating half-life, increasing thermal stability, enhancing transmembrane delivery, targeting to a particular location or cell type, increasing interaction with silencing pathway enzymes, increasing release from endosomes) as an expression inhibitor.

[0400] An iRNA as described herein can contain one or more mismatches to the target sequence. In one embodiment, an iRNA as described herein contains no more than 3 mismatches. If the antisense strand of the iRNA contains mismatches to a target sequence, it is preferable that the area of mismatch is not located in the center of the region of complementarity. If the antisense strand of the iRNA contains mismatches to the target sequence, it is preferable that the mismatch be restricted to be within the last 5 nucleotides from either the 5′- or 3′-end of the region of complementarity. For example, for a 23 nucleotide iRNA agent the strand which is complementary to a region of, e.g., a CFB gene, generally does not contain any mismatch within the central 13 nucleotides. The methods described herein or methods known in the art can be used to determine whether an iRNA containing a mismatch to a target sequence is effective in inhibiting the expression of a target gene, e.g., a CFB, C3, or C9 gene. Consideration of the efficacy of iRNAs with mismatches in inhibiting expression of a target gene is important, especially if the particular region of complementarity in a target gene is known to have polymorphic sequence variation within the population.

### III. Modified iRNAs of the Invention

[0401] In one embodiment, the RNA of the iRNA of the invention e.g., a dsRNA, is un-modified, and does not comprise, e.g., chemical modifications and/or conjugations known in the art and described herein. In another embodiment, the RNA of an iRNA of the invention, e.g., a dsRNA, is chemically modified to enhance stability or other beneficial characteristics. In certain embodiments of the invention, substantially all of the nucleotides of an iRNA of the invention are modified. In other embodiments of the invention, all of the nucleotides of an iRNA of the invention are modified iRNAs of the invention in which “substantially all of the nucleotides are modified” are largely but not wholly modified and can include not more than 5, 4, 3, 2, or 1 unmodified nucleotides.

[0402] The nucleic acids featured in the invention can be synthesized and/or modified by methods well established in the art, such as those described in “Current protocols in nucleic acid chemistry,” Beaucage, S. L. et al. (Edrs.), John Wiley & Sons, Inc., New York, NY, USA, which is hereby incorporated herein by reference. Modifications include, for example, end modifications, e.g., 5′-end modifications (phosphorylation, conjugation, inverted linkages) or 3′-end modifications (conjugation, DNA nucleotides, inverted linkages, etc.); base modifications, e.g., replacement with stabilizing bases, destabilizing bases, or bases that base pair with an expanded repertoire of partners, removal of bases (abasic nucleotides), or conjugated bases; sugar modifications (e.g., at the 2′-position or 4′-position) or replacement of the sugar; and/or backbone modifications, including modification or replacement of the phosphodiester linkages. Specific examples of iRNA compounds useful in the embodiments described herein include, but are not limited to RNAs containing modified backbones or no natural internucleoside linkages. RNAs having modified backbones include, among others, those that do not have a phosphorus atom in the backbone. For the purposes of this specification, and as sometimes referenced in the art, modified RNAs that do not have a phosphorus atom in their internucleoside backbone can also be considered to be oligonucleosides. In some embodiments, a modified iRNA will have a phosphorus atom in its internucleoside backbone.

[0403] Modified RNA backbones include, for example, phosphorothioates, chiral phosphorothioates, phosphorodithioates, phosphotriesters, aminoalkylphosphotriesters, methyl and other alkyl phosphonates including 3′-alkylene phosphonates and chiral phosphonates, phosphinates, phosphoramidates including 3′-amino phosphoramidate and aminoalkylphosphoramidates, thionophosphoramidates, thionoalkylphosphonates, thionoalkylphosphotriesters, and boranophosphates having normal 3′-5′ linkages, 2′-5′-linked analogs of these, and those having inverted polarity wherein the adjacent pairs of nucleoside units are linked 3′-5′ to 5′-3′ or 2′-5′ to 5′-2′. Various salts, mixed salts and free acid forms are also included.

[0404] Representative U.S. patents that teach the preparation of the above phosphorus-containing linkages include, but are not limited to, U.S. Pat. Nos. 3,687,808; 4,469,863; 4,476,301; 5,023,243; 5,177,195; 5,188,897; 5,264,423; 5,276,019; 5,278,302; 5,286,717; 5,321,131; 5,399,676; 5,405,939; 5,453,496; 5,455,233; 5,466,677; 5,476,925; 5,519,126; 5,536,821; 5,541,316; 5,550,111; 5,563,253; 5,571,799; 5,587,361; 5,625,050; 6,028,188; 6,124,445; 6,160,109; 6,169,170; 6,172,209; 6,239,265; 6,277,603; 6,326,199; 6,346,614; 6,444,423; 6,531,590; 6,534,639; 6,608,035; 6,683, 167; 6,858,715; 6,867,294; 6,878,805; 7,015,315; 7,041,816; 7,273,933; 7,321,029; and U.S. Pat. RE39464, the entire contents of each of which are hereby incorporated herein by reference.

[0405] Modified RNA backbones that do not include a phosphorus atom therein have backbones that are formed by short chain alkyl or cycloalkyl internucleoside linkages, mixed heteroatoms and alkyl or cycloalkyl internucleoside linkages, or one or more short chain heteroatomic or heterocyclic internucleoside linkages. These include those having morpholino linkages (formed in part from the sugar portion of a nucleoside); siloxane backbones; sulfide, sulfoxide and sulfone backbones; formacetyl and thioformacetyl backbones; methylene formacetyl and thioformacetyl backbones; alkene containing backbones; sulfamate backbones; methyleneimino and methylenehydrazino backbones; sulfonate and sulfonamide backbones; amide backbones; and others having mixed N, O, S and CH₂ component parts.

[0406] Representative U.S. patents that teach the preparation of the above oligonucleosides include, but are not limited to, U.S. Pat. Nos. 5,034,506; 5,166,315; 5,185,444; 5,214,134; 5,216,141; 5,235,033; 5,64,562; 5,264,564; 5,405,938; 5,434,257; 5,466,677; 5,470,967; 5,489,677; 5,541,307; 5,561,225; 5,596,086; 5,602,240; 5,608,046; 5,610,289; 5,618,704; 5,623,070; 5,663,312; 5,633,360; 5,677,437; and, 5,677,439, the entire contents of each of which are hereby incorporated herein by reference.

[0407] In other embodiments, suitable RNA mimetics are contemplated for use in iRNAs, in which both the sugar and the internucleoside linkage, i.e., the backbone, of the nucleotide units are replaced with novel groups. The base units are maintained for hybridization with an appropriate nucleic acid target compound. One such oligomeric compound, an RNA mimetic that has been shown to have excellent hybridization properties, is referred to as a peptide nucleic acid (PNA). In PNA compounds, the sugar backbone of an RNA is replaced with an amide containing backbone, in particular an aminoethylglycine backbone. The nucleobases are retained and are bound directly or indirectly to aza nitrogen atoms of the amide portion of the backbone. Representative U.S. patents that teach the preparation of PNA compounds include, but are not limited to, U.S. Pat. Nos. 5,539,082; 5,714,331; and 5,719,262, the entire contents of each of which are hereby incorporated herein by reference. Additional PNA compounds suitable for use in the iRNAs of the invention are described in, for example, in Nielsen et al., Science, 1991, 254, 1497-1500.

[0408] Some embodiments featured in the invention include RNAs with phosphorothioate backbones and oligonucleosides with heteroatom backbones, and in particular —CH₂—NH—CH₂—, —CH₂—N(CH₃)—O—CH₂— [known as a methylene (methylimino) or MMI backbone], —CH₂—O—N(CH₃)—CH₂—, —CH₂—N(CH₃)—N(CH₃)—CH₂— and —N(CH₃)—CH₂—CH₂— [wherein the native phosphodiester backbone is represented as —O—P—O—CH₂—] of the above-referenced U.S. Pat. No. 5,489,677, and the amide backbones of the above-referenced U.S. Pat. No. 5,602,240. In some embodiments, the RNAs featured herein have morpholino backbone structures of the above-referenced U.S. Pat. No. 5,034,506.

[0409] Modified RNAs can also contain one or more substituted sugar moieties. The iRNAs, e.g., dsRNAs, featured herein can include one of the following at the 2′-position: OH; F; O—, S-, or N-alkyl; O—, S-, or N-alkenyl; O—, S- or N-alkynyl; or O-alkyl-O-alkyl, wherein the alkyl, alkenyl and alkynyl can be substituted or unsubstituted C₁ to C₁₀ alkyl or C₂ to C₁₀ alkenyl and alkynyl. Exemplary suitable modifications include O[(CH₂)ₙ[O]ₘCH₃, O(CH₂)·ₙOCH₃, O(CH₂)ₙNH₂, O(CH₂)ₙCH₃, O(CH₂)ₙONH₂, and O(CH₂)ₙON[(CH₂)ₙCH₃)]₂, where n and m are from 1 to about 10. In other embodiments, dsRNAs include one of the following at the 2′ position: C₁ to C₁₀ lower alkyl, substituted lower alkyl, alkaryl, aralkyl, O-alkaryl or O-aralkyl, SH, SCH₃, OCN, Cl, Br, CN, CF3, OCF₃, SOCH₃, SO₂CH₃, ONO₂, NO₂, N₃, NH₂, heterocycloalkyl, heterocycloalkaryl, aminoalkylamino, polyalkylamino, substituted silyl, an RNA cleaving group, a reporter group, an intercalator, a group for improving the pharmacokinetic properties of an iRNA, or a group for improving the pharmacodynamic properties of an iRNA, and other substituents having similar properties. In some embodiments, the modification includes a 2′-methoxyethoxy (2′-O—CH₂CH₂OCH₃, also known as 2′-O-(2-methoxyethyl) or 2′-MOE) (Martin et al., Helv. Chim. Acta, 1995, 78:486-504) i.e., an alkoxy-alkoxy group. Another exemplary modification is 2′-dimethylaminooxyethoxy, i.e., a O(CH₂)₂ON(CH₃)₂ group, also known as 2′-DMAOE, as described in examples herein below, and 2′-dimethylaminoethoxyethoxy (also known in the art as 2′-O-dimethylaminoethoxyethyl or 2′-DMAEOE), i.e., 2′-O—CH₂—O—CH₂—N(CH₂)₂.

[0410] Other modifications include 2′-methoxy (2′—OCH₃), 2′-aminopropoxy (2′-OCH₂CH₂CH₂NH₂) and 2′-fluoro (2′-F). Similar modifications can also be made at other positions on the RNA of an iRNA, particularly the 3′ position of the sugar on the 3′ terminal nucleotide or in 2′-5′ linked dsRNAs and the 5′ position of 5′ terminal nucleotide. iRNAs can also have sugar mimetics such as cyclobutyl moieties in place of the pentofuranosyl sugar. Representative U.S. patents that teach the preparation of such modified sugar structures include, but are not limited to, U.S. Pat. Nos. 4,981,957; 5,118,800; 5,319,080; 5,359,044; 5,393,878; 5,446,137; 5,466,786; 5,514,785; 5,519,134; 5,567,811; 5,576,427; 5,591,722; 5,597,909; 5,610,300; 5,627,053; 5,639,873; 5,646,265; 5,658,873; 5,670,633; and 5,700,920, certain of which are commonly owned with the instant application. The entire contents of each of the foregoing are hereby incorporated herein by reference.

[0411] An iRNA can also include nucleobase (often referred to in the art simply as “base”) modifications or substitutions. As used herein, “unmodified” or “natural” nucleobases include the purine bases adenine (A) and guanine (G), and the pyrimidine bases thymine (T), cytosine (C) and uracil (U). Modified nucleobases include other synthetic and natural nucleobases such as deoxy-thymine (dT), 5-methylcytosine (5-me-C), 5-hydroxymethyl cytosine, xanthine, hypoxanthine, 2-aminoadenine, 6-methyl and other alkyl derivatives of adenine and guanine, 2-propyl and other alkyl derivatives of adenine and guanine, 2-thiouracil, 2-thiothymine and 2-thiocytosine, 5-halouracil and cytosine, 5-propynyl uracil and cytosine, 6-azo uracil, cytosine and thymine, 5-uracil (pseudouracil), 4-thiouracil, 8-halo, 8-amino, 8-thiol, 8-thioalkyl, 8-hydroxyl anal other 8-substituted adenines and guanines, 5-halo, particularly 5-bromo, 5-trifluoromethyl and other 5-substituted uracils and cytosines, 7-methylguanine and 7-methyladenine, 8-azaguanine and 8-azaadenine, 7-deazaguanine and 7-daazaadenine and 3-deazaguanine and 3-deazaadenine. Further nucleobases include those disclosed in U.S. Pat. No. 3,687,808, those disclosed in Modified Nucleosides in Biochemistry, Biotechnology and Medicine, Herdewijn, P. ed. Wiley-VCH, 2008; those disclosed in The Concise Encyclopedia Of Polymer Science And Engineering, pages 858-859, Kroschwitz, J. L, ed. John Wiley & Sons, 1990, these disclosed by Englisch et al., Angewandte Chemie, International Edition, 1991, 30, 613, and those disclosed by Sanghvi, Y S., Chapter 15, dsRNA Research and Applications, pages 289-302, Crooke, S. T. and Lebleu, B., Ed., CRC Press, 1993. Certain of these nucleobases are particularly useful for increasing the binding affinity of the oligomeric compounds featured in the invention. These include 5-substituted pyrimidines, 6-azapyrimidines and N-2, N-6 and 0-6 substituted purines, including 2-aminopropyladenine, 5-propynyluracil and 5-propynylcytosine. 5-methylcytosine substitutions have been shown to increase nucleic acid duplex stability by 0.6-1.2° C. (Sanghvi, Y. S., Crooke, S. T. and Lebleu, B., Eds., dsRNA Research and Applications, CRC Press, Boca Raton, 1993, pp. 276-278) and are exemplary base substitutions, even more particularly when combined with 2′-O-methoxyethyl sugar modifications.

[0412] Representative U.S. patents that teach the preparation of certain of the above noted modified nucleobases as well as other modified nucleobases include, but are not limited to, the above noted U.S. Pat. Nos. 3,687,808, 4,845,205; 5,130,30; 5,134,066; 5,175,273; 5,367,066; 5,432,272; 5,457,187; 5,459,255; 5,484,908; 5,502,177; 5,525,711; 5,552,540; 5,587,469; 5,594,121, 5,596,091; 5,614,617; 5,681,941; 5,750,692; 6,015,886; 6,147,200; 6, 166,197; 6,222,025; 6,235,887; 6,380,368; 6,528,640; 6,639,062; 6,617,438; 7,045,610; 7,427,672; and 7,495,088, the entire contents of each of which are hereby incorporated herein by reference.

[0413] The RNA of an iRNA can also be modified to include one or more bicyclic sugar moities. A “bicyclic sugar” is a furanosyl ring modified by the bridging of two atoms. A “bicyclic nucleoside” (“BNA”) is a nucleoside having a sugar moiety comprising a bridge connecting two carbon atoms of the sugar ring, thereby forming a bicyclic ring system. In certain embodiments, the bridge connects the 4′-carbon and the 2′-carbon of the sugar ring. Thus, in some embodiments an agent of the invention may include one or more locked nucleic acids (LNA). A locked nucleic acid is a nucleotide having a modified ribose moiety in which the ribose moiety comprises an extra bridge connecting the 2′ and 4′ carbons. In other words, an LNA is a nucleotide comprising a bicyclic sugar moiety comprising a 4′-CH₂-O-2′ bridge. This structure effectively “locks” the ribose in the 3′-endo structural conformation. The addition of locked nucleic acids to siRNAs has been shown to increase siRNA stability in serum, and to reduce off-target effects (Elmen, J. et al., (2005) Nucleic Acids Research 33 (1): 439-447; Mook, OR. et al., (2007) Mol Canc Ther 6 (3): 833-843; Grunweller, A. et al., (2003) Nucleic Acids Research 31 (12): 3185-3193). Examples of bicyclic nucleosides for use in the polynucleotides of the invention include without limitation nucleosides comprising a bridge between the 4′ and the 2′ ribosyl ring atoms. In certain embodiments, the antisense polynucleotide agents of the invention include one or more bicyclic nucleosides comprising a 4′ to 2′ bridge. Examples of such 4′ to 2′ bridged bicyclic nucleosides, include but are not limited to 4′-(CH2)-O-2′ (LNA); 4′-(CH2)-S-2′; 4′-(CH2) 2-O-2′ (ENA); 4′-CH(CH₃)-O-2′ (also referred to as “constrained ethyl” or “cEt”) and 4′-CH(CH2OCH3)-O-2′ (and analogs thereof; see, e.g., U.S. Pat. No. 7,399,845); 4′-C(CH3) (CH3)-O-2′ (and analogs thereof; see e.g., U.S. Pat. No. 8,278,283); 4′-CH2-N(OCH3)-2′ (and analogs thereof; see e.g., U.S. Pat. No. 8,278,425); 4′-CH2-O-N(CH3)-2′ (see, e.g., U.S. Patent Publication No. 2004/0171570); 4′-CH2-N(R)—O-2′, wherein R is H, C1-C12 alkyl, or a protecting group (see, e.g., U.S. Pat. No. 7,427,672); 4′-CH2-C(H) (CH3)-2′ (see, e.g., Chattopadhyaya et al., J. Org. Chem., 2009, 74, 118-134); and 4′-CH2-C(═CH2)-2′ (and analogs thereof; see, e.g., U.S. Pat. No. 8,278,426). The entire contents of each of the foregoing are hereby incorporated herein by reference.

[0414] Additional representative U.S. Patents and US Patent Publications that teach the preparation of locked nucleic acid nucleotides include, but are not limited to, the following: U.S. Pat. Nos. 6,268,490; 6,525,191; 6,670,461; 6,770,748; 6,794,499; 6,998,484; 7,053,207; 7,034, 133; 7,084,125; 7,399,845; 7,427,672; 7,569,686; 7,741,457; 8,022,193; 8,030,467; 8,278,425; 8,278,426; 8,278,283; US 2008/0039618; and US 2009/0012281, the entire contents of each of which are hereby incorporated herein by reference.

[0415] Any of the foregoing bicyclic nucleosides can be prepared having one or more stereochemical sugar configurations including for example α-L-ribofuranose and β-D-ribofuranose (see WO 99/14226).

[0416] The RNA of an iRNA can also be modified to include one or more constrained ethyl nucleotides. As used herein, a “constrained ethyl nucleotide” or “cEt” is a locked nucleic acid comprising a bicyclic sugar moiety comprising a 4′-CH(CH₃)-O-2′ bridge. In one embodiment, a constrained ethyl nucleotide is in the S conformation referred to herein as “S-cEt.”

[0417] An iRNA of the invention may also include one or more “conformationally restricted nucleotides” (“CRN”). CRN are nucleotide analogs with a linker connecting the C2′ and C4′ carbons of ribose or the C3 and —C5′ carbons of ribose. CRN lock the ribose ring into a stable conformation and increase the hybridization affinity to mRNA. The linker is of sufficient length to place the oxygen in an optimal position for stability and affinity resulting in less ribose ring puckering.

[0418] Representative publications that teach the preparation of certain of the above noted CRN include, but are not limited to, US Patent Publication No. 2013/0190383; and PCT publication WO 2013/036868, the entire contents of each of which are hereby incorporated herein by reference.

[0419] One or more of the nucleotides of an iRNA of the invention may also include a hydroxymethyl substituted nucleotide. A “hydroxymethyl substituted nucleotide” is an acyclic 2′-3′-seco-nucleotide, also referred to as an “unlocked nucleic acid” (“UNA”) modification

[0420] Representative U.S. publications that teach the preparation of UNA include, but are not limited to, U.S. Pat. No. 8,314,227; and US Patent Publication Nos. 2013/0096289; 2013/0011922; and 2011/0313020, the entire contents of each of which are hereby incorporated herein by reference. Potentially stabilizing modifications to the ends of RNA molecules can include N-(acetylaminocaproyl)-4-hydroxyprolinol (Hyp-C6-NHAc), N-(caproyl-4-hydroxyprolinol (Hyp-C6), N-(acetyl-4-hydroxyprolinol (Hyp-NHAc), thymidine-2′-O-deoxythymidine (ether), N-(aminocaproyl)-4-hydroxyprolinol (Hyp-C6-amino), 2-docosanoyl-uridine-3″-phosphate, inverted base dT (idT) and others. Disclosure of this modification can be found in PCT Publication No. WO 2011/005861.

A. Modified iRNAs Comprising Motifs of the Invention

[0421] In certain aspects of the invention, the double-stranded RNAi agents of the invention include agents with chemical modifications as disclosed, for example, in U.S. Provisional Application No. 61/561,710, filed on Nov. 18, 2011, or in PCT/US2012/065691, the entire contents of each of which are incorporated herein by reference.

[0422] As shown herein and in Provisional Application No. 61/561,710 or in PCT/US2012/065691, a superior result may be obtained by introducing one or more motifs of three identical modifications on three consecutive nucleotides into a sense strand and/or antisense strand of an RNAi agent, particularly at or near the cleavage site. In some embodiments, the sense strand and antisense strand of the RNAi agent may otherwise be completely modified. The introduction of these motifs interrupts the modification pattern, if present, of the sense and/or antisense strand. The RNAi agent may be optionally conjugated with a GalNAc derivative ligand, for instance on the sense strand. The resulting RNAi agents present superior gene silencing activity.

[0423] More specifically, it has been surprisingly discovered that when the sense strand and antisense strand of the double-stranded RNAi agent are completely modified to have one or more motifs of three identical modifications on three consecutive nucleotides at or near the cleavage site of at least one strand of an RNAi agent, the gene silencing acitivity of the RNAi agent was superiorly enhanced.

[0424] Accordingly, the invention provides double-stranded RNAi agents capable of inhibiting the expression of a target gene (i.e., a CFB, C3, or C9 gene) in vivo. The RNAi agent comprises a sense strand and an antisense strand. Each strand of the RNAi agent may range from 12-30 nucleotides in length. For example, each strand may be between 14-30 nucleotides in length, 17-30 nucleotides in length, 25-30 nucleotides in length, 27-30 nucleotides in length, 17-23 nucleotides in length, 17-21 nucleotides in length, 17-19 nucleotides in length, 19-25 nucleotides in length, 19-23 nucleotides in length, 19-21 nucleotides in length, 21-25 nucleotides in length, or 21-23 nucleotides in length.

[0425] The sense strand and antisense strand typically form a duplex double stranded RNA (“dsRNA”), also referred to herein as an “RNAi agent.” The duplex region of an RNAi agent may be 12-30 nucleotide pairs in length. For example, the duplex region can be between 14-30 nucleotide pairs in length, 17-30 nucleotide pairs in length, 27-30 nucleotide pairs in length, 17-23 nucleotide pairs in length, 17-21 nucleotide pairs in length, 17-19 nucleotide pairs in length, 19-25 nucleotide pairs in length, 19-23 nucleotide pairs in length, 19-21 nucleotide pairs in length, 21-25 nucleotide pairs in length, or 21-23 nucleotide pairs in length. In another example, the duplex region is selected from 15, 16, 17, 18, 19, 20, 21, 22, 23, 24, 25, 26, and 27 nucleotides in length.

[0426] In one embodiment, the RNAi agent may contain one or more overhang regions and/or capping groups at the 3′-end, 5′-end, or both ends of one or both strands. The overhang can be 1-6 nucleotides in length, for instance 2-6 nucleotides in length, 1-5 nucleotides in length, 2-5 nucleotides in length, 1-4 nucleotides in length, 2-4 nucleotides in length, 1-3 nucleotides in length, 2-3 nucleotides in length, or 1-2 nucleotides in length. The overhangs can be the result of one strand being longer than the other, or the result of two strands of the same length being staggered. The overhang can form a mismatch with the target mRNA or it can be complementary to the gene sequences being targeted or can be another sequence. The first and second strands can also be joined, e.g., by additional bases to form a hairpin, or by other non-base linkers.

[0427] In one embodiment, the nucleotides in the overhang region of the RNAi agent can each independently be a modified or unmodified nucleotide including, but no limited to 2′-sugar modified, such as, 2-F, 2′-Omethyl, thymidine (T), 2′-O-methoxyethyl-5-methyluridine (Teo), 2′-O-methoxyethyladenosine (Aeo), 2′-O-methoxyethyl-5-methylcytidine (m5Ceo), and any combinations thereof. For example, TT can be an overhang sequence for either end on either strand. The overhang can form a mismatch with the target mRNA or it can be complementary to the gene sequences being targeted or can be another sequence.

[0428] The 5′- or 3′-overhangs at the sense strand, antisense strand or both strands of the RNAi agent may be phosphorylated. In some embodiments, the overhang region(s) contains two nucleotides having a phosphorothioate between the two nucleotides, where the two nucleotides can be the same or different. In one embodiment, the overhang is present at the 3′-end of the sense strand, antisense strand, or both strands. In one embodiment, this 3′-overhang is present in the antisense strand. In one embodiment, this 3′-overhang is present in the sense strand.

[0429] The RNAi agent may contain only a single overhang, which can strengthen the interference activity of the RNAi, without affecting its overall stability. For example, the single-stranded overhang may be located at the 3′-terminal end of the sense strand or, alternatively, at the 3′-terminal end of the antisense strand. The RNAi may also have a blunt end, located at the 5′-end of the antisense strand (or the 3′-end of the sense strand) or vice versa. Generally, the antisense strand of the RNAi has a nucleotide overhang at the 3′-end, and the 5′-end is blunt. While not wishing to be bound by theory, the asymmetric blunt end at the 5′-end of the antisense strand and 3′-end overhang of the antisense strand favor the guide strand loading into RISC process.

[0430] In one embodiment, the RNAi agent is a double ended bluntmer of 19 nucleotides in length, wherein the sense strand contains at least one motif of three 2′-F modifications on three consecutive nucleotides at positions 7, 8, 9 from the 5′end. The antisense strand contains at least one motif of three 2′-O-methyl modifications on three consecutive nucleotides at positions 11, 12, 13 from the 5′end.

[0431] In another embodiment, the RNAi agent is a double ended bluntmer of 20 nucleotides in length, wherein the sense strand contains at least one motif of three 2′-F modifications on three consecutive nucleotides at positions 8, 9, 10 from the 5′end. The antisense strand contains at least one motif of three 2′-O-methyl modifications on three consecutive nucleotides at positions 11, 12, 13 from the 5′end.

[0432] In yet another embodiment, the RNAi agent is a double ended bluntmer of 21 nucleotides in length, wherein the sense strand contains at least one motif of three 2′-F modifications on three consecutive nucleotides at positions 9, 10, 11 from the 5′end. The antisense strand contains at least one motif of three 2′-O-methyl modifications on three consecutive nucleotides at positions 11, 12, 13 from the 5′end.

[0433] In one embodiment, the RNAi agent comprises a 21 nucleotide sense strand and a 23 nucleotide antisense strand, wherein the sense strand contains at least one motif of three 2′-F modifications on three consecutive nucleotides at positions 9, 10, 11 from the 5′end; the antisense strand contains at least one motif of three 2′-O-methyl modifications on three consecutive nucleotides at positions 11, 12, 13 from the 5′end, wherein one end of the RNAi agent is blunt, while the other end comprises a 2 nucleotide overhang. Preferably, the 2 nucleotide overhang is at the 3′-end of the antisense strand. When the 2 nucleotide overhang is at the 3′-end of the antisense strand, there may be two phosphorothioate internucleotide linkages between the terminal three nucleotides, wherein two of the three nucleotides are the overhang nucleotides, and the third nucleotide is a paired nucleotide next to the overhang nucleotide. In one embodiment, the RNAi agent additionally has two phosphorothioate internucleotide linkages between the terminal three nucleotides at both the 5′-end of the sense strand and at the 5′-end of the antisense strand. In one embodiment, every nucleotide in the sense strand and the antisense strand of the RNAi agent, including the nucleotides that are part of the motifs are modified nucleotides. In one embodiment each residue is independently modified with a 2′-O-methyl or 3′-fluoro, e.g., in an alternating motif. Optionally, the RNAi agent further comprises a ligand (preferably GalNAC₃).

[0434] In one embodiment, the RNAi agent comprises a sense and an antisense strand, wherein the sense strand is 25-30 nucleotide residues in length, wherein starting from the 5′ terminal nucleotide (position 1) positions 1 to 23 of the first strand comprise at least 8 ribonucleotides; the antisense strand is 36-66 nucleotide residues in length and, starting from the 3′ terminal nucleotide, comprises at least 8 ribonucleotides in the positions paired with positions 1-23 of sense strand to form a duplex; wherein at least the 3 ‘terminal nucleotide of antisense strand is unpaired with sense strand, and up to 6 consecutive 3’ terminal nucleotides are unpaired with sense strand, thereby forming a 3′ single stranded overhang of 1-6 nucleotides; wherein the 5′ terminus of antisense strand comprises from 10-30 consecutive nucleotides which are unpaired with sense strand, thereby forming a 10-30 nucleotide single stranded 5′ overhang; wherein at least the sense strand 5′ terminal and 3′ terminal nucleotides are base paired with nucleotides of antisense strand when sense and antisense strands are aligned for maximum complementarity, thereby forming a substantially duplexed region between sense and antisense strands; and antisense strand is sufficiently complementary to a target RNA along at least 19 ribonucleotides of antisense strand length to reduce target gene expression when the double stranded nucleic acid is introduced into a mammalian cell; and wherein the sense strand contains at least one motif of three 2′-F modifications on three consecutive nucleotides, where at least one of the motifs occurs at or near the cleavage site. The antisense strand contains at least one motif of three 2′-O-methyl modifications on three consecutive nucleotides at or near the cleavage site.

[0435] In one embodiment, the RNAi agent comprises sense and antisense strands, wherein the RNAi agent comprises a first strand having a length which is at least 25 and at most 29 nucleotides and a second strand having a length which is at most 30 nucleotides with at least one motif of three 2′-O-methyl modifications on three consecutive nucleotides at position 11, 12, 13 from the 5′ end; wherein the 3′ end of the first strand and the 5′ end of the second strand form a blunt end and the second strand is 1-4 nucleotides longer at its 3′ end than the first strand, wherein the duplex region region which is at least 25 nucleotides in length, and the second strand is sufficiently complementary to a target mRNA along at least 19 nucleotide of the second strand length to reduce target gene expression when the RNAi agent is introduced into a mammalian cell, and wherein dicer cleavage of the RNAi agent preferentially results in an siRNA comprising the 3′ end of the second strand, thereby reducing expression of the target gene in the mammal. Optionally, the RNAi agent further comprises a ligand.

[0436] In one embodiment, the sense strand of the RNAi agent contains at least one motif of three identical modifications on three consecutive nucleotides, where one of the motifs occurs at the cleavage site in the sense strand.

[0437] In one embodiment, the antisense strand of the RNAi agent can also contain at least one motif of three identical modifications on three consecutive nucleotides, where one of the motifs occurs at or near the cleavage site in the antisense strand

[0438] For an RNAi agent having a duplex region of 17-23 nucleotide in length, the cleavage site of the antisense strand is typically around the 10, 11 and 12 positions from the 5′-end. Thus the motifs of three identical modifications may occur at the 9, 10, 11 positions; 10, 11, 12 positions; 11, 12, 13 positions; 12, 13, 14 positions; or 13, 14, 15 positions of the antisense strand, the count starting from the 1st nucleotide from the 5′-end of the antisense strand, or, the count starting from the 1st paired nucleotide within the duplex region from the 5′-end of the antisense strand. The cleavage site in the antisense strand may also change according to the length of the duplex region of the RNAi from the 5′-end.

[0439] The sense strand of the RNAi agent may contain at least one motif of three identical modifications on three consecutive nucleotides at the cleavage site of the strand; and the antisense strand may have at least one motif of three identical modifications on three consecutive nucleotides at or near the cleavage site of the strand. When the sense strand and the antisense strand form a dsRNA duplex, the sense strand and the antisense strand can be so aligned that one motif of the three nucleotides on the sense strand and one motif of the three nucleotides on the antisense strand have at least one nucleotide overlap, i.e., at least one of the three nucleotides of the motif in the sense strand forms a base pair with at least one of the three nucleotides of the motif in the antisense strand. Alternatively, at least two nucleotides may overlap, or all three nucleotides may overlap.

[0440] In one embodiment, the sense strand of the RNAi agent may contain more than one motif of three identical modifications on three consecutive nucleotides. The first motif may occur at or near the cleavage site of the strand and the other motifs may be a wing modification. The term “wing modification” herein refers to a motif occurring at another portion of the strand that is separated from the motif at or near the cleavage site of the same strand. The wing modification is either adjacent to the first motif or is separated by at least one or more nucleotides. When the motifs are immediately adjacent to each other then the chemistry of the motifs are distinct from each other and when the motifs are separated by one or more nucleotide than the chemistries can be the same or different. Two or more wing modifications may be present. For instance, when two wing modifications are present, each wing modification may occur at one end relative to the first motif which is at or near cleavage site or on either side of the lead motif.

[0441] Like the sense strand, the antisense strand of the RNAi agent may contain more than one motifs of three identical modifications on three consecutive nucleotides, with at least one of the motifs occurring at or near the cleavage site of the strand. This antisense strand may also contain one or more wing modifications in an alignment similar to the wing modifications that may be present on the sense strand.

[0442] In one embodiment, the wing modification on the sense strand or antisense strand of the RNAi agent typically does not include the first one or two terminal nucleotides at the 3′-end, 5′-end or both ends of the strand.

[0443] In another embodiment, the wing modification on the sense strand or antisense strand of the RNAi agent typically does not include the first one or two paired nucleotides within the duplex region at the 3′-end, 5′-end or both ends of the strand.

[0444] When the sense strand and the antisense strand of the RNAi agent each contain at least one wing modification, the wing modifications may fall on the same end of the duplex region, and have an overlap of one, two or three nucleotides.

[0445] When the sense strand and the antisense strand of the RNAi agent each contain at least two wing modifications, the sense strand and the antisense strand can be so aligned that two modifications each from one strand fall on one end of the duplex region, having an overlap of one, two or three nucleotides; two modifications each from one strand fall on the other end of the duplex region, having an overlap of one, two or three nucleotides; two modifications one strand fall on each side of the lead motif, having an overlap of one, two or three nucleotides in the duplex region.

[0446] In one embodiment, every nucleotide in the sense strand and antisense strand of the RNAi agent, including the nucleotides that are part of the motifs, may be modified. Each nucleotide may be modified with the same or different modification which can include one or more alteration of one or both of the non-linking phosphate oxygens and/or of one or more of the linking phosphate oxygens; alteration of a constituent of the ribose sugar, e.g., of the 2′ hydroxyl on the ribose sugar; wholesale replacement of the phosphate moiety with “dephospho” linkers; modification or replacement of a naturally occurring base; and replacement or modification of the ribose-phosphate backbone.

[0447] As nucleic acids are polymers of subunits, many of the modifications occur at a position which is repeated within a nucleic acid, e.g., a modification of a base, or a phosphate moiety, or a non-linking O of a phosphate moiety. In some cases the modification will occur at all of the subject positions in the nucleic acid but in many cases it will not. By way of example, a modification may only occur at a 3′ or 5′ terminal position, may only occur in a terminal region, e.g., at a position on a terminal nucleotide or in the last 2, 3, 4, 5, or 10 nucleotides of a strand. A modification may occur in a double strand region, a single strand region, or in both. A modification may occur only in the double strand region of a RNA or may only occur in a single strand region of a RNA. For example, a phosphorothioate modification at a non-linking O position may only occur at one or both termini, may only occur in a terminal region, e.g., at a position on a terminal nucleotide or in the last 2, 3, 4, 5, or 10 nucleotides of a strand, or may occur in double strand and single strand regions, particularly at termini. The 5′ end or ends can be phosphorylated.

[0448] It may be possible, e.g., to enhance stability, to include particular bases in overhangs, or to include modified nucleotides or nucleotide surrogates, in single strand overhangs, e.g., in a 5′ or 3′ overhang, or in both. For example, it can be desirable to include purine nucleotides in overhangs. In some embodiments all or some of the bases in a 3′ or 5′ overhang may be modified, e.g., with a modification described herein. Modifications can include, e.g., the use of modifications at the 2′ position of the ribose sugar with modifications that are known in the art, e.g., the use of deoxyribonucleotides, 2′-deoxy-2′-fluoro (2′-F) or 2′-O-methyl modified instead of the ribosugar of the nucleobase, and modifications in the phosphate group, e.g., phosphorothioate modifications. Overhangs need not be homologous with the target sequence.

[0449] In one embodiment, each residue of the sense strand and antisense strand is independently modified with LNA, CRN, CET, UNA, HNA, CeNA, 2′-methoxyethyl, 2′-O-methyl, 2′-O-allyl, 2′-C-allyl, 2′-deoxy, 2′-hydroxyl, or 2′-fluoro. The strands can contain more than one modification. In one embodiment, each residue of the sense strand and antisense strand is independently modified with 2′-O-methyl or 2′-fluoro.

[0450] At least two different modifications are typically present on the sense strand and antisense strand. Those two modifications may be the 2′-O-methyl or 2′-fluoro modifications, or others.

[0451] In one embodiment, the Nₐ and/or N_{b} comprise modifications of an alternating pattern. The term “alternating motif” as used herein refers to a motif having one or more modifications, each modification occurring on alternating nucleotides of one strand. The alternating nucleotide may refer to one per every other nucleotide or one per every three nucleotides, or a similar pattern. For example, if A, B and C each represent one type of modification to the nucleotide, the alternating motif can be “ABABABABABAB . . . ,” “AABBAABBAABB . . . ,” “AABAABAABAAB . . . ,” “AAABAAABAAAB . . . ,” “AAABBBAAABBB . . . ,” or “ABCABCABCABC . . . ,” etc.

[0452] The type of modifications contained in the alternating motif may be the same or different. For example, if A, B, C, D each represent one type of modification on the nucleotide, the alternating pattern, i.e., modifications on every other nucleotide, may be the same, but each of the sense strand or antisense strand can be selected from several possibilities of modifications within the alternating motif such as “ABABAB . . . ” “ACACAC . . . ” “BDBDBD . . . ” or “CDCDCD . . . ,” etc.

[0453] In one embodiment, the RNAi agent of the invention comprises the modification pattern for the alternating motif on the sense strand relative to the modification pattern for the alternating motif on the antisense strand is shifted. The shift may be such that the modified group of nucleotides of the sense strand corresponds to a differently modified group of nucleotides of the antisense strand and vice versa. For example, the sense strand when paired with the antisense strand in the dsRNA duplex, the alternating motif in the sense strand may start with “ABABAB” from 5′-3′ of the strand and the alternating motif in the antisense strand may start with “BABABA” from 5′-3′ of the strand within the duplex region. As another example, the alternating motif in the sense strand may start with “AABBAABB” from 5′-3′ of the strand and the alternating motif in the antisenese strand may start with “BBAABBAA” from 5′-3′ of the strand within the duplex region, so that there is a complete or partial shift of the modification patterns between the sense strand and the antisense strand.

[0454] In one embodiment, the RNAi agent comprises the pattern of the alternating motif of 2′-O-methyl modification and 2′-F modification on the sense strand initially has a shift relative to the pattern of the alternating motif of 2′-O-methyl modification and 2′-F modification on the antisense strand initially, i.e., the 2′-O-methyl modified nucleotide on the sense strand base pairs with a 2′-F modified nucleotide on the antisense strand and vice versa. The 1 position of the sense strand may start with the 2′-F modification, and the 1 position of the antisense strand may start with the 2′-O-methyl modification.

[0455] The introduction of one or more motifs of three identical modifications on three consecutive nucleotides to the sense strand and/or antisense strand interrupts the initial modification pattern present in the sense strand and/or antisense strand. This interruption of the modification pattern of the sense and/or antisense strand by introducing one or more motifs of three identical modifications on three consecutive nucleotides to the sense and/or antisense strand surprisingly enhances the gene silencing acitivty to the target gene.

[0456] In one embodiment, when the motif of three identical modifications on three consecutive nucleotides is introduced to any of the strands, the modification of the nucleotide next to the motif is a different modification than the modification of the motif. For example, the portion of the sequence containing the motif is “ . . . . NaYYYNb . . . ,” where “Y” represents the modification of the motif of three identical modifications on three consecutive nucleotide, and “Nₐ” and “No” represent a modification to the nucleotide next to the motif “YYY” that is different than the modification of Y, and where Nₐ and N_{b} can be the same or different modifications. Alternatively, Nₐ and/or No may be present or absent when there is a wing modification present.

[0457] The RNAi agent may further comprise at least one phosphorothioate or methylphosphonate internucleotide linkage. The phosphorothioate or methylphosphonate internucleotide linkage modification may occur on any nucleotide of the sense strand or antisense strand or both strands in any position of the strand. For instance, the internucleotide linkage modification may occur on every nucleotide on the sense strand and/or antisense strand; each internucleotide linkage modification may occur in an alternating pattern on the sense strand and/or antisense strand; or the sense strand or antisense strand may contain both internucleotide linkage modifications in an alternating pattern. The alternating pattern of the internucleotide linkage modification on the sense strand may be the same or different from the antisense strand, and the alternating pattern of the internucleotide linkage modification on the sense strand may have a shift relative to the alternating pattern of the internucleotide linkage modification on the antisense strand. In one embodiment, a double-standed RNAi agent comprises 6-8 phosphorothioate internucleotide linkages. In one embodiment, the antisense strand comprises two phosphorothioate internucleotide linkages at the 5′-terminus and two phosphorothioate internucleotide linkages at the 3′-terminus, and the sense strand comprises at least two phosphorothioate internucleotide linkages at either the 5′-terminus or the 3′-terminus.

[0458] In one embodiment, the RNAi comprises a phosphorothioate or methylphosphonate internucleotide linkage modification in the overhang region. For example, the overhang region may contain two nucleotides having a phosphorothioate or methylphosphonate internucleotide linkage between the two nucleotides. Internucleotide linkage modifications also may be made to link the overhang nucleotides with the terminal paired nucleotides within the duplex region. For example, at least 2, 3, 4, or all the overhang nucleotides may be linked through phosphorothioate or methylphosphonate internucleotide linkage, and optionally, there may be additional phosphorothioate or methylphosphonate internucleotide linkages linking the overhang nucleotide with a paired nucleotide that is next to the overhang nucleotide. For instance, there may be at least two phosphorothioate internucleotide linkages between the terminal three nucleotides, in which two of the three nucleotides are overhang nucleotides, and the third is a paired nucleotide next to the overhang nucleotide. These terminal three nucleotides may be at the 3′-end of the antisense strand, the 3′-end of the sense strand, the 5′-end of the antisense strand, and/or the 5′end of the antisense strand.

[0459] In one embodiment, the 2 nucleotide overhang is at the 3′-end of the antisense strand, and there are two phosphorothioate internucleotide linkages between the terminal three nucleotides, wherein two of the three nucleotides are the overhang nucleotides, and the third nucleotide is a paired nucleotide next to the overhang nucleotide. Optionally, the RNAi agent may additionally have two phosphorothioate internucleotide linkages between the terminal three nucleotides at both the 5′-end of the sense strand and at the 5′-end of the antisense strand.

[0460] In one embodiment, the RNAi agent comprises mismatch(es) with the target, within the duplex, or combinations thereof. The mistmatch may occur in the overhang region or the duplex region. The base pair may be ranked on the basis of their propensity to promote dissociation or melting (e.g., on the free energy of association or dissociation of a particular pairing, the simplest approach is to examine the pairs on an individual pair basis, though next neighbor or similar analysis can also be used). In terms of promoting dissociation: A: U is preferred over G: C; G: U is preferred over G: C; and I: C is preferred over G: C (I-inosine). Mismatches, e.g., non-canonical or other than canonical pairings (as described elsewhere herein) are preferred over canonical (A: T, A: U, G: C) pairings; and pairings which include a universal base are preferred over canonical pairings.

[0461] In one embodiment, the RNAi agent comprises at least one of the first 1, 2, 3, 4, or 5 base pairs within the duplex regions from the 5′-end of the antisense strand independently selected from the group of: A: U, G: U, I: C, and mismatched pairs, e.g., non-canonical or other than canonical pairings or pairings which include a universal base, to promote the dissociation of the antisense strand at the 5′-end of the duplex.

[0462] In one embodiment, the nucleotide at the 1 position within the duplex region from the 5′-end in the antisense strand is selected from the group consisting of A, dA, dU, U, and dT. Alternatively, at least one of the first 1, 2 or 3 base pair within the duplex region from the 5′-end of the antisense strand is an AU base pair. For example, the first base pair within the duplex region from the 5′-end of the antisense strand is an AU base pair.

[0463] In another embodiment, the nucleotide at the 3′-end of the sense strand is deoxy-thymine (dT). In another embodiment, the nucleotide at the 3′-end of the antisense strand is deoxy-thymine (dT). In one embodiment, there is a short sequence of deoxy-thymine nucleotides, for example, two dT nucleotides on the 3′-end of the sense and/or antisense strand.

[0464] In one embodiment, the sense strand sequence may be represented by formula (I):

5′nₚ-Nₐ-(X X X)ᵢ-N_{b}-Y Y Y-N_{b}-(Z Z Z)ⱼ-Nₐ-n_{q}3′ (I)
[0465] wherein:
[0466] i and j are each independently 0 or 1;
[0467] p and q are each independently 0-6;
[0468] each Nₐ independently represents an oligonucleotide sequence comprising 0-25 modified nucleotides, each sequence comprising at least two differently modified nucleotides;
[0469] each N_{b} independently represents an oligonucleotide sequence comprising 0-10 modified nucleotides;
[0470] each nₚ and n_{q} independently represent an overhang nucleotide;
[0471] wherein N_{b} and Y do not have the same modification; and
[0472] XXX, YYY and ZZZ each independently represent one motif of three identical modifications on three consecutive nucleotides. Preferably YYY is all 2′-F modified nucleotides.

[0473] In one embodiment, the Nₐ and/or N_{b} comprise modifications of alternating pattern.

[0474] In one embodiment, the YYY motif occurs at or near the cleavage site of the sense strand. For example, when the RNAi agent has a duplex region of 17-23 nucleotides in length, the YYY motif can occur at or the vicinity of the cleavage site (e.g.: can occur at positions 6, 7, 8, 7, 8, 9, 8, 9, 10, 9, 10, 11, 10, 11, 12 or 11, 12, 13) of—the sense strand, the count starting from the 1^{st} nucleotide, from the 5′-end; or optionally, the count starting at the 1^{st} paired nucleotide within the duplex region, from the 5′-end.

[0475] In one embodiment, i is 1 and j is 0, or i is 0 and j is 1, or both i and j are 1. The sense strand can therefore be represented by the following formulas:

5′nₚ-Nₐ-YYY-N_{b}-ZZZ-Nₐ-n_{q}3′ (Ib);

5′nₚ-Nₐ-XXX-N_{b}-YYY-Nₐ-n_{q}3′ (Ic); or

5′nₚ-Nₐ-XXX-N_{b}-YYY-N_{b}-ZZZ-Nₐ-n_{q}3′ (Id).

[0476] When the sense strand is represented by formula (Ib), N_{b} represents an oligonucleotide sequence comprising 0-10, 0-7, 0-5, 0-4, 0-2 or 0 modified nucleotides. Each Nₐ independently can represent an oligonucleotide sequence comprising 2-20, 2-15, or 2-10 modified nucleotides.

[0477] When the sense strand is represented as formula (Ic), N_{b} represents an oligonucleotide sequence comprising 0-10, 0-7, 0-10, 0-7, 0-5, 0-4, 0-2 or 0 modified nucleotides. Each Nₐ can independently represent an oligonucleotide sequence comprising 2-20, 2-15, or 2-10 modified nucleotides.

[0478] When the sense strand is represented as formula (Id), each N_{b} independently represents an oligonucleotide sequence comprising 0-10, 0-7, 0-5, 0-4, 0-2 or 0 modified nucleotides. Preferably, N_{b} is 0, 1, 2, 3, 4, 5 or 6 Each Nₐ can independently represent an oligonucleotide sequence comprising 2-20, 2-15, or 2-10 modified nucleotides.

[0479] Each of X, Y and Z may be the same or different from each other.

[0480] In other embodiments, i is 0 and j is 0, and the sense strand may be represented by the formula:

5′nₚ-Nₐ-YYY-Nₐ-n_{q}3′ (Ia).

[0481] When the sense strand is represented by formula (Ia), each Nₐ independently can represent an oligonucleotide sequence comprising 2-20, 2-15, or 2-10 modified nucleotides.

[0482] In one embodiment, the antisense strand sequence of the RNAi may be represented by formula (II):

5′n_{q′}-Nₐ′-(Z′Z′Z′)ₖ-N_{b}′-Y′Y′Y′-N_{b}′-(X′X′X′)ₗ-N′ₐ-nₚ′3′ (II)
[0483] wherein:
[0484] k and l are each independently 0 or 1;
[0485] p′ and q′ are each independently 0-6;
[0486] each Nₐ′ independently represents an oligonucleotide sequence comprising 0-25 modified nucleotides, each sequence comprising at least two differently modified nucleotides;
[0487] each N_{b}′ independently represents an oligonucleotide sequence comprising 0-10 modified nucleotides;
[0488] each nₚ′ and n_{q}′ independently represent an overhang nucleotide;
[0489] wherein N_{b}′ and Y′ do not have the same modification;
[0490] and
[0491] X′X′X′, Y′Y′Y′ and Z′Z′Z′ each independently represent one motif of three identical modifications on three consecutive nucleotides.

[0492] In one embodiment, the Nₐ′ and/or N_{b}′ comprise modifications of alternating pattern.

[0493] The Y′Y′Y′ motif occurs at or near the cleavage site of the antisense strand. For example, when the RNAi agent has a duplex region of 17-23 nucleotidein length, the Y′Y′Y′ motif can occur at positions 9, 10, 11; 10, 11, 12; 11, 12, 13; 12, 13, 14; or 13, 14, 15 of the antisense strand, with the count starting from the 1st nucleotide, from the 5′-end; or optionally, the count starting at the 1st paired nucleotide within the duplex region, from the 5′-end. Preferably, the Y′Y′Y′ motif occurs at positions 11, 12, 13.

[0494] In one embodiment, Y′Y′Y′ motif is all 2′-OMe modified nucleotides.

[0495] In one embodiment, k is 1 and 1 is 0, or k is 0 and 1 is 1, or both k and l are 1.

[0496] The antisense strand can therefore be represented by the following formulas:

5′n_{q′}-Nₐ′-Z′Z′Z′-N_{b}′-Y′Y′Y′-Nₐ′-n_{p′}3′(IIb);

5′n_{q}-Nₐ′-Y′Y′Y′-N_{b}′-X′X′X′-nₚ3′ (IIc); or

5′n_{q′}-Nₐ′-Z′Z′Z′-N_{b}′-Y′Y′Y′-N_{b}′-X′X′X′-Nₐ′-nₚ3′ (IId).

[0497] When the antisense strand is represented by formula (IIb), N_{b} represents an oligonucleotide sequence comprising 0-10, 0-7, 0-10, 0-7, 0-5, 0-4, 0-2 or 0 modified nucleotides. Each Nₐ′ independently represents an oligonucleotide sequence comprising 2-20, 2-15, or 2-10 modified nucleotides.

[0498] When the antisense strand is represented as formula (IIc), N_{b}′ represents an oligonucleotide sequence comprising 0-10, 0-7, 0-10, 0-7, 0-5, 0-4, 0-2 or 0 modified nucleotides. Each Nₐ′ independently represents an oligonucleotide sequence comprising 2-20, 2-15, or 2-10 modified nucleotides.

[0499] When the antisense strand is represented as formula (IId), each N_{b}′ independently represents an oligonucleotide sequence comprising 0-10, 0-7, 0-10, 0-7, 0-5, 0-4, 0-2 or 0 modified nucleotides. Each Nₐ′ independently represents an oligonucleotide sequence comprising 2-20, 2-15, or 2-10 modified nucleotides. Preferably, N_{b} is 0, 1, 2, 3, 4, 5 or 6.

[0500] In other embodiments, k is 0 and 1 is 0 and the antisense strand may be represented by the formula:

5′nₚ-N_{a′}-Y′Y′Y′-N_{a′}-n_{q′}3′ (Ia).

[0501] When the antisense strand is represented as formula (IIa), each Nₐ′ independently represents an oligonucleotide sequence comprising 2-20, 2-15, or 2-10 modified nucleotides.

[0502] Each of X′, Y′ and Z′ may be the same or different from each other.

[0503] Each nucleotide of the sense strand and antisense strand may be independently modified with LNA, HNA, CeNA, 2′-methoxyethyl, 2′-O-methyl, 2′-O-allyl, 2′-C-allyl, 2′-hydroxyl, or 2′-fluoro. For example, each nucleotide of the sense strand and antisense strand is independently modified with 2′-O-methyl or 2′-fluoro. Each X, Y, Z, X′, Y′ and Z′, in particular, may represent a 2′-O-methyl modification or a 2′-fluoro modification.

[0504] In one embodiment, the sense strand of the RNAi agent may contain YYY motif occurring at 9, 10 and 11 positions of the strand when the duplex region is 21 nt, the count starting from the 1^{st} nucleotide from the 5′-end, or optionally, the count starting at the 1^{st} paired nucleotide within the duplex region, from the 5′-end; and Y represents 2′-F modification. The sense strand may additionally contain XXX motif or ZZZ motifs as wing modifications at the opposite end of the duplex region; and XXX and ZZZ each independently represents a 2′-OMe modification or 2′-F modification.

[0505] In one embodiment the antisense strand may contain Y′Y′Y′ motif occurring at positions 11, 12, 13 of the strand, the count starting from the 1^{st} nucleotide from the 5′-end, or optionally, the count starting at the 1^{st} paired nucleotide within the duplex region, from the 5′-end; and Y′ represents 2′-O-methyl modification. The antisense strand may additionally contain X′X′X′ motif or Z′Z′Z′ motifs as wing modifications at the opposite end of the duplex region; and X′X′X′ and Z′Z′Z′ each independently represents a 2′-OMe modification or 2′-F modification.

[0506] The sense strand represented by any one of the above formulas (Ia), (Ib), (Ic), and (Id) forms a duplex with a antisense strand being represented by any one of formulas (IIa), (IIb), (IIc), and (IId), respectively.

[0507] Accordingly, the RNAi agents for use in the methods of the invention may comprise a sense strand and an antisense strand, each strand having 14 to 30 nucleotides, the RNAi duplex represented by formula (III):

sense: 5′nₚ-Nₐ-(X X X)ᵢ-N_{b}-Y Y Y-N_{b}-(Z Z Z)ⱼ-Nₐ-n_{q}3′

antisense: 3′nₚ′-Nₐ′-(X′X′X′)ₖ-N_{b}′-Y′Y′Y′-N_{b}′-(Z′Z′Z′)ₗ-Nₐ′-n_{q}′5′ (III)
[0508] wherein:
[0509] i, j, k, and l are each independently 0 or 1;
[0510] p, p′, q, and q′ are each independently 0-6;
[0511] each Nₐ and Nₐ independently represents an oligonucleotide sequence comprising 0-25 modified nucleotides, each sequence comprising at least two differently modified nucleotides;
[0512] each N_{b} and N_{b} independently represents an oligonucleotide sequence comprising 0-10 modified nucleotides;
[0513] wherein
[0514] each nₚ′, nₚ, n_{q}′, and n_{q}, each of which may or may not be present, independently represents an overhang nucleotide; and
[0515] XXX, YYY, ZZZ, X′X′X′, Y′Y′Y′, and Z′Z′Z′ each independently represent one motif of three identical modifications on three consecutive nucleotides.

[0516] In one embodiment, i is 0 and j is 0; or i is 1 and j is 0; or i is 0 and j is 1; or both i and j are 0; or both i and j are 1. In another embodiment, k is 0 and 1 is 0; or kis 1 and 1 is 0; k is 0 and 1 is 1; or both k and 1 are 0; or both k and 1 are 1.

[0517] Exemplary combinations of the sense strand and antisense strand forming a RNAi duplex include the formulas below:

5′nₚ-Nₐ-Y Y Y-Nₐ-n_{q}3′

3′nₚ-Nₐ-Y′Y′Y′-Nₐ n_{q}5′ (IIIa)

5′nₚ-Nₐ-Y Y Y—N_{b}-ZZZ-Nₐ-n_{q}3′

3′nₚ-Nₐ-Y′Y′Y′-N_{b}—Z′Z′Z′-Nₐ n_{q}5′ (IIIb)

5′ nₚ-Nₐ-X X X—N_{b}-Y Y Y-Nₐ-n_{q}3′

3′ nₚ-Nₐ-X′X′X′-N_{b}-Y′Y′Y′-Nₐ-n_{q}5′ (IIIc)

5′nₚ-Nₐ—XXX-N_{b}-Y Y Y-N_{b}-ZZZ-Nₐ-n_{q}3′

3′nₚ-Nₐ-X′X′X′-N_{b}-Y′Y′Y′-N_{b}—Z′Z′Z′-Nₐ-n_{q}5′ (IIId)

[0518] When the RNAi agent is represented by formula (IIIa), each Nₐ independently represents an oligonucleotide sequence comprising 2-20, 2-15, or 2-10 modified nucleotides.

[0519] When the RNAi agent is represented by formula (IIIb), each N_{b} independently represents an oligonucleotide sequence comprising 1-10, 1-7, 1-5 or 1-4 modified nucleotides. Each Nₐ independently represents an oligonucleotide sequence comprising 2-20, 2-15, or 2-10 modified nucleotides.

[0520] When the RNAi agent is represented as formula (IIIc), each N_{b}, N_{b}′ independently represents an oligonucleotide sequence comprising 0-10, 0-7, 0-10, 0-7, 0-5, 0-4, 0-2 or 0 modified nucleotides. Each Nₐ independently represents an oligonucleotide sequence comprising 2-20, 2-15, or 2-10 modified nucleotides.

[0521] When the RNAi agent is represented as formula (IIId), each N_{b}, N_{b}′ independently represents an oligonucleotide sequence comprising 0-10, 0-7, 0-10, 0-7, 0-5, 0-4, 0-2 or 0 modified nucleotides. Each Nₐ, Nₐ independently represents an oligonucleotide sequence comprising 2-20, 2-15, or 2-10 modified nucleotides. Each of Nₐ, Nₐ′, No and N_{b} independently comprises modifications of alternating pattern. Each of X, Y and Z in formulas (III), (IIIa), (IIIb), (IIIc), and (IIId) may be the same or different from each other.

[0522] When the RNAi agent is represented by formula (III), (IIIa), (IIIb), (IIIc), and (IIId), at least one of the Y nucleotides may form a base pair with one of the Y′ nucleotides. Alternatively, at least two of the Y nucleotides form base pairs with the corresponding Y′ nucleotides; or all three of the Y nucleotides all form base pairs with the corresponding Y′ nucleotides.

[0523] When the RNAi agent is represented by formula (IIIb) or (IIId), at least one of the Z nucleotides may form a base pair with one of the Z′ nucleotides. Alternatively, at least two of the Z nucleotides form base pairs with the corresponding Z′ nucleotides; or all three of the Z nucleotides all form base pairs with the corresponding Z′ nucleotides.

[0524] When the RNAi agent is represented as formula (IIIc) or (IIId), at least one of the X nucleotides may form a base pair with one of the X′ nucleotides. Alternatively, at least two of the X nucleotides form base pairs with the corresponding X′ nucleotides; or all three of the X nucleotides all form base pairs with the corresponding X′ nucleotides.

[0525] In one embodiment, the modification on the Y nucleotide is different than the modification on the Y′ nucleotide, the modification on the Z nucleotide is different than the modification on the Z′ nucleotide, and/or the modification on the X nucleotide is different than the modification on the X′ nucleotide.

[0526] In one embodiment, when the RNAi agent is represented by formula (IIId), the Nₐ modifications are 2′-O-methyl or 2′-fluoro modifications. In another embodiment, when the RNAi agent is represented by formula (IIId), the Nₐ modifications are 2′-O-methyl or 2′-fluoro modifications and nₚ′>0 and at least one nₚ′ is linked to a neighboring nucleotide a via phosphorothioate linkage. In yet another embodiment, when the RNAi agent is represented by formula (IIId), the Nₐ modifications are 2′-O-methyl or 2′-fluoro modifications, nₚ′>0 and at least one nₚ′ is linked to a neighboring nucleotide via phosphorothioate linkage, and the sense strand is conjugated to one or more GalNAc derivatives attached through a bivalent or trivalent branched linker (described below). In another embodiment, when the RNAi agent is represented by formula (IIId), the Nₐ modifications are 2′-O-methyl or 2′-fluoro modifications, nₚ′>0 and at least one nₚ′ is linked to a neighboring nucleotide via phosphorothioate linkage, the sense strand comprises at least one phosphorothioate linkage, and the sense strand is conjugated to one or more GalNAc derivatives attached through a bivalent or trivalent branched linker.

[0527] In one embodiment, when the RNAi agent is represented by formula (IIIa), the Nₐ modifications are 2′-O-methyl or 2′-fluoro modifications, nₚ′>0 and at least one nₚ′ is linked to a neighboring nucleotide via phosphorothioate linkage, the sense strand comprises at least one phosphorothioate linkage, and the sense strand is conjugated to one or more GalNAc derivatives attached through a bivalent or trivalent branched linker.

[0528] In one embodiment, the RNAi agent is a multimer containing at least two duplexes represented by formula (III), (IIIa), (IIIb), (IIIc), and (IIId), wherein the duplexes are connected by a linker. The linker can be cleavable or non-cleavable. Optionally, the multimer further comprises a ligand. Each of the duplexes can target the same gene or two different genes; or each of the duplexes can target same gene at two different target sites.

[0529] In one embodiment, the RNAi agent is a multimer containing three, four, five, six or more duplexes represented by formula (III), (IIIa), (IIIb), (IIIc), and (IIId), wherein the duplexes are connected by a linker. The linker can be cleavable or non-cleavable. Optionally, the multimer further comprises a ligand. Each of the duplexes can target the same gene or two different genes; or each of the duplexes can target same gene at two different target sites.

[0530] In one embodiment, two RNAi agents represented by formula (III), (IIIa), (IIIb), (IIIc), and (IIId) are linked to each other at the 5′ end, and one or both of the 3′ ends and are optionally conjugated to to a ligand. Each of the agents can target the same gene or two different genes; or each of the agents can target same gene at two different target sites.

[0531] Various publications describe multimeric RNAi agents that can be used in the methods of the invention. Such publications include WO2007/091269, U.S. Pat. No. 7,858,769, WO2010/141511, WO2007/117686, WO2009/014887 and WO2011/031520 the entire contents of each of which are hereby incorporated herein by reference.

[0532] As described in more detail below, the RNAi agent that contains conjugations of one or more carbohydrate moieties to a RNAi agent can optimize one or more properties of the RNAi agent. In many cases, the carbohydrate moiety will be attached to a modified subunit of the RNAi agent. For example, the ribose sugar of one or more ribonucleotide subunits of a dsRNA agent can be replaced with another moiety, e.g., a non-carbohydrate (preferably cyclic) carrier to which is attached a carbohydrate ligand. A ribonucleotide subunit in which the ribose sugar of the subunit has been so replaced is referred to herein as a ribose replacement modification subunit (RRMS). A cyclic carrier may be a carbocyclic ring system, i.e., all ring atoms are carbon atoms, or a heterocyclic ring system, i.e., one or more ring atoms may be a heteroatom, e.g., nitrogen, oxygen, sulfur. The cyclic carrier may be a monocyclic ring system, or may contain two or more rings, e.g. fused rings. The cyclic carrier may be a fully saturated ring system, or it may contain one or more double bonds.

[0533] The ligand may be attached to the polynucleotide via a carrier. The carriers include (i) at least one “backbone attachment point,” preferably two “backbone attachment points” and (ii) at least one “tethering attachment point.” A “backbone attachment point” as used herein refers to a functional group, e.g. a hydroxyl group, or generally, a bond available for, and that is suitable for incorporation of the carrier into the backbone, e.g., the phosphate, or modified phosphate, e.g., sulfur containing, backbone, of a ribonucleic acid. A “tethering attachment point” (TAP) in some embodiments refers to a constituent ring atom of the cyclic carrier, e.g., a carbon atom or a heteroatom (distinct from an atom which provides a backbone attachment point), that connects a selected moiety. The moiety can be, e.g., a carbohydrate, e.g. monosaccharide, disaccharide, trisaccharide, tetrasaccharide, oligosaccharide and polysaccharide. Optionally, the selected moiety is connected by an intervening tether to the cyclic carrier. Thus, the cyclic carrier will often include a functional group, e.g., an amino group, or generally, provide a bond, that is suitable for incorporation or tethering of another chemical entity, e.g., a ligand to the constituent ring.

[0534] The RNAi agents may be conjugated to a ligand via a carrier, wherein the carrier can be cyclic group or acyclic group; preferably, the cyclic group is selected from pyrrolidinyl, pyrazolinyl, pyrazolidinyl, imidazolinyl, imidazolidinyl, piperidinyl, piperazinyl, [1,3]dioxolane, oxazolidinyl, isoxazolidinyl, morpholinyl, thiazolidinyl, isothiazolidinyl, quinoxalinyl, pyridazinonyl, tetrahydrofuryl and and decalin; preferably, the acyclic group is selected from serinol backbone or diethanolamine backbone.

[0535] In certain specific embodiments, the RNAi agent for use in the methods of the invention is an agent selected from the group of agents listed in any one of Tables 3-8.

[0536] These agents may further comprise a ligand.

### IV. iRNAs Conjugated to Ligands

[0537] Another modification of the RNA of an iRNA of the invention involves chemically linking to the RNA one or more ligands, moieties or conjugates that enhance the activity, cellular distribution or cellular uptake of the iRNA. Such moieties include but are not limited to lipid moieties such as a cholesterol moiety (Letsinger et al., Proc. Natl. Acid. Sci. USA, 1989, 86:6553-6556), cholic acid (Manoharan et al., Biorg. Med. Chem. Let., 1994, 4:1053-1060), a thioether, e.g., beryl-S-tritylthiol (Manoharan et al., Ann. N.Y. Acad. Sci., 1992, 660:306-309; Manoharan et al., Biorg. Med. Chem. Let., 1993, 3:2765-2770), a thiocholesterol (Oberhauser et al., Nucl. Acids Res., 1992, 20:533-538), an aliphatic chain, e.g., dodecandiol or undecyl residues (Saison-Behmoaras et al., EMBO J, 1991, 10:1111-1118; Kabanov et al., FEBS Lett., 1990, 259:327-330; Svinarchuk et al., Biochimie, 1993, 75:49-54), a phospholipid, e.g., di-hexadecyl-rac-glycerol or triethyl-ammonium 1,2-di-O-hexadecyl-rac-glycero-3-phosphonate (Manoharan et al., Tetrahedron Lett., 1995, 36:3651-3654; Shea et al., Nucl. Acids Res., 1990, 18:3777-3783), a polyamine or a polyethylene glycol chain (Manoharan et al., Nucleosides & Nucleotides, 1995, 14:969-973), or adamantane acetic acid (Manoharan et al., Tetrahedron Lett., 1995, 36:3651-3654), a palmityl moiety (Mishra et al., Biochim. Biophys. Acta, 1995, 1264:229-237), or an octadecylamine or hexylamino-carbonyloxycholesterol moiety (Crooke et al., J. Pharmacol. Exp. Ther., 1996, 277:923-937).

[0538] In one embodiment, a ligand alters the distribution, targeting or lifetime of an iRNA agent into which it is incorporated. In preferred embodiments a ligand provides an enhanced affinity for a selected target, e.g., molecule, cell or cell type, compartment, e.g., a cellular or organ compartment, tissue, organ or region of the body, as, e.g., compared to a species absent such a ligand. Preferred ligands will not take part in duplex pairing in a duplexed nucleic acid.

[0539] Ligands can include a naturally occurring substance, such as a protein (e.g., human serum albumin (HSA), low-density lipoprotein (LDL), or globulin); carbohydrate (e.g., a dextran, pullulan, chitin, chitosan, inulin, cyclodextrin, N-acetylgalactosamine, or hyaluronic acid); or a lipid. The ligand can also be a recombinant or synthetic molecule, such as a synthetic polymer, e.g., a synthetic polyamino acid. Examples of polyamino acids include polyamino acid is a polylysine (PLL), poly L-aspartic acid, poly L-glutamic acid, styrene-maleic acid anhydride copolymer, poly(L-lactide-co-glycolied) copolymer, divinyl ether-maleic anhydride copolymer, N-(2-hydroxypropyl) methacrylamide copolymer (HMPA), polyethylene glycol (PEG), polyvinyl alcohol (PVA), polyurethane, poly(2-ethylacryllic acid), N-isopropylacrylamide polymers, or polyphosphazine. Example of polyamines include: polyethylenimine, polylysine (PLL), spermine, spermidine, polyamine, pseudopeptide-polyamine, peptidomimetic polyamine, dendrimer polyamine, arginine, amidine, protamine, cationic lipid, cationic porphyrin, quaternary salt of a polyamine, or an alpha helical peptide.

[0540] Ligands can also include targeting groups, e.g., a cell or tissue targeting agent, e.g., a lectin, glycoprotein, lipid or protein, e.g., an antibody, that binds to a specified cell type such as a kidney cell. A targeting group can be a thyrotropin, melanotropin, lectin, glycoprotein, surfactant protein A, Mucin carbohydrate, multivalent lactose, multivalent galactose, N-acetyl-galactosamine, N-acetyl-gulucoseamine multivalent mannose, multivalent fucose, glycosylated polyaminoacids, multivalent galactose, transferrin, bisphosphonate, polyglutamate, polyaspartate, a lipid, cholesterol, a steroid, bile acid, folate, vitamin B12, vitamin A, biotin, or an RGD peptide or RGD peptide mimetic.

[0541] Other examples of ligands include dyes, intercalating agents (e.g. acridines), cross-linkers (e.g. psoralene, mitomycin C), porphyrins (TPPC4, texaphyrin, Sapphyrin), polycyclic aromatic hydrocarbons (e.g., phenazine, dihydrophenazine), artificial endonucleases (e.g. EDTA), lipophilic molecules, e.g., cholesterol, cholic acid, adamantane acetic acid, 1-pyrene butyric acid, dihydrotestosterone, 1,3-Bis-O (hexadecyl)glycerol, geranyloxyhexyl group, hexadecylglycerol, borneol, menthol, 1,3-propanediol, heptadecyl group, palmitic acid, myristic acid, 03-(oleoyl) lithocholic acid, O3-(oleoyl) cholenic acid, dimethoxytrityl, or phenoxazine) and peptide conjugates (e.g., antennapedia peptide, Tat peptide), alkylating agents, phosphate, amino, mercapto, PEG (e.g., PEG-40K), MPEG, [MPEG]₂, polyamino, alkyl, substituted alkyl, radiolabeled markers, enzymes, haptens (e.g. biotin), transport/absorption facilitators (e.g., aspirin, vitamin E, folic acid), synthetic ribonucleases (e.g., imidazole, bisimidazole, histamine, imidazole clusters, acridine-imidazole conjugates, Eu3+ complexes of tetraazamacrocycles), dinitrophenyl, HRP, or AP.

[0542] Ligands can be proteins, e.g., glycoproteins, or peptides, e.g., molecules having a specific affinity for a co-ligand, or antibodies e.g., an antibody, that binds to a specified cell type such as a hepatic cell. Ligands can also include hormones and hormone receptors. They can also include non-peptidic species, such as lipids, lectins, carbohydrates, vitamins, cofactors, multivalent lactose, multivalent galactose, N-acetyl-galactosamine, N-acetyl-gulucosamine multivalent mannose, or multivalent fucose. The ligand can be, for example, a lipopolysaccharide, an activator of p38 MAP kinase, or an activator of NF-κB.

[0543] The ligand can be a substance, e.g., a drug, which can increase the uptake of the iRNA agent into the cell, for example, by disrupting the cell's cytoskeleton, e.g., by disrupting the cell's microtubules, microfilaments, and/or intermediate filaments. The drug can be, for example, taxon, vincristine, vinblastine, cytochalasin, nocodazole, japlakinolide, latrunculin A, phalloidin, swinholide A, indanocine, or myoservin.

[0544] In some embodiments, a ligand attached to an iRNA as described herein acts as a pharmacokinetic modulator (PK modulator). PK modulators include lipophiles, bile acids, steroids, phospholipid analogues, peptides, protein binding agents, PEG, vitamins etc. Exemplary PK modulators include, but are not limited to, cholesterol, fatty acids, cholic acid, lithocholic acid, dialkylglycerides, diacylglyceride, phospholipids, sphingolipids, naproxen, ibuprofen, vitamin E, biotin etc. Oligonucleotides that comprise a number of phosphorothioate linkages are also known to bind to serum protein, thus short oligonucleotides, e.g., oligonucleotides of about 5 bases, 10 bases, 15 bases or 20 bases, comprising multiple of phosphorothioate linkages in the backbone are also amenable to the present invention as ligands (e.g. as PK modulating ligands). In addition, aptamers that bind serum components (e.g. serum proteins) are also suitable for use as PK modulating ligands in the embodiments described herein.

[0545] Ligand-conjugated oligonucleotides of the invention may be synthesized by the use of an oligonucleotide that bears a pendant reactive functionality, such as that derived from the attachment of a linking molecule onto the oligonucleotide (described below). This reactive oligonucleotide may be reacted directly with commercially-available ligands, ligands that are synthesized bearing any of a variety of protecting groups, or ligands that have a linking moiety attached thereto.

[0546] The oligonucleotides used in the conjugates of the present invention may be conveniently and routinely made through the well-known technique of solid-phase synthesis. Equipment for such synthesis is sold by several vendors including, for example, Applied Biosystems (Foster City, Calif.). Any other means for such synthesis known in the art may additionally or alternatively be employed. It is also known to use similar techniques to prepare other oligonucleotides, such as the phosphorothioates and alkylated derivatives.

[0547] In the ligand-conjugated oligonucleotides and ligand-molecule bearing sequence-specific linked nucleosides of the present invention, the oligonucleotides and oligonucleosides may be assembled on a suitable DNA synthesizer utilizing standard nucleotide or nucleoside precursors, or nucleotide or nucleoside conjugate precursors that already bear the linking moiety, ligand-nucleotide or nucleoside-conjugate precursors that already bear the ligand molecule, or non-nucleoside ligand-bearing building blocks.

[0548] When using nucleotide-conjugate precursors that already bear a linking moiety, the synthesis of the sequence-specific linked nucleosides is typically completed, and the ligand molecule is then reacted with the linking moiety to form the ligand-conjugated oligonucleotide. In some embodiments, the oligonucleotides or linked nucleosides of the present invention are synthesized by an automated synthesizer using phosphoramidites derived from ligand-nucleoside conjugates in addition to the standard phosphoramidites and non-standard phosphoramidites that are commercially available and routinely used in oligonucleotide synthesis.

### A. Lipid Conjugates

[0549] In one embodiment, the ligand or conjugate is a lipid or lipid-based molecule. Such a lipid or lipid-based molecule preferably binds a serum protein, e.g., human serum albumin (HSA). An HSA binding ligand allows for distribution of the conjugate to a target tissue, e.g., a non-kidney target tissue of the body. For example, the target tissue can be the liver, including parenchymal cells of the liver. Other molecules that can bind HSA can also be used as ligands. For example, naproxen or aspirin can be used. A lipid or lipid-based ligand can (a) increase resistance to degradation of the conjugate, (b) increase targeting or transport into a target cell or cell membrane, and/or (c) can be used to adjust binding to a serum protein, e.g., HSA.

[0550] A lipid based ligand can be used to inhibit, e.g., control the binding of the conjugate to a target tissue. For example, a lipid or lipid-based ligand that binds to HSA more strongly will be less likely to be targeted to the kidney and therefore less likely to be cleared from the body. A lipid or lipid-based ligand that binds to HSA less strongly can be used to target the conjugate to the kidney.

[0551] In a preferred embodiment, the lipid based ligand binds HSA. Preferably, it binds HSA with a sufficient affinity such that the conjugate will be preferably distributed to a non-kidney tissue. However, it is preferred that the affinity not be so strong that the HSA-ligand binding cannot be reversed.

[0552] In another preferred embodiment, the lipid based ligand binds HSA weakly or not at all, such that the conjugate will be preferably distributed to the kidney. Other moieties that target to kidney cells can also be used in place of or in addition to the lipid based ligand.

[0553] In another aspect, the ligand is a moiety, e.g., a vitamin, which is taken up by a target cell, e.g., a proliferating cell. These are particularly useful for treating disorders characterized by unwanted cell proliferation, e.g., of the malignant or non-malignant type, e.g., cancer cells. Exemplary vitamins include vitamin A, E, and K. Other exemplary vitamins include are B vitamin, e.g., folic acid, B12, riboflavin, biotin, pyridoxal or other vitamins or nutrients taken up by target cells such as liver cells. Also included are HSA and low density lipoprotein (LDL).

### B. Cell Permeation Agents

[0554] In another aspect, the ligand is a cell-permeation agent, preferably a helical cell-permeation agent. Preferably, the agent is amphipathic. An exemplary agent is a peptide such as tat or antennopedia. If the agent is a peptide, it can be modified, including a peptidylmimetic, invertomers, non-peptide or pseudo-peptide linkages, and use of D-amino acids. The helical agent is preferably an alpha-helical agent, which preferably has a lipophilic and a lipophobic phase.

[0555] The ligand can be a peptide or peptidomimetic. A peptidomimetic (also referred to herein as an oligopeptidomimetic) is a molecule capable of folding into a defined three-dimensional structure similar to a natural peptide. The attachment of peptide and peptidomimetics to iRNA agents can affect pharmacokinetic distribution of the iRNA, such as by enhancing cellular recognition and absorption. The peptide or peptidomimetic moiety can be about 5-50 amino acids long, e.g., about 5, 10, 15, 20, 25, 30, 35, 40, 45, or 50 amino acids long.

[0556] A peptide or peptidomimetic can be, for example, a cell permeation peptide, cationic peptide, amphipathic peptide, or hydrophobic peptide (e.g., consisting primarily of Tyr, Trp or Phe). The peptide moiety can be a dendrimer peptide, constrained peptide or crosslinked peptide. In another alternative, the peptide moiety can include a hydrophobic membrane translocation sequence (MTS). An exemplary hydrophobic MTS-containing peptide is RFGF having the amino acid sequence AAVALLPAVLLALLAP (SEQ ID NO: 23). An RFGF analogue (e.g., amino acid sequence AALLPVLLAAP (SEQ ID NO: 24) containing a hydrophobic MTS can also be a targeting moiety. The peptide moiety can be a “delivery” peptide, which can carry large polar molecules including peptides, oligonucleotides, and protein across cell membranes. For example, sequences from the HIV Tat protein (GRKKRRQRRRPPQ (SEQ ID NO: 25) and the Drosophila Antennapedia protein (RQIKIWFQNRRMKWKK (SEQ ID NO: 26) have been found to be capable of functioning as delivery peptides. A peptide or peptidomimetic can be encoded by a random sequence of DNA, such as a peptide identified from a phage-display library, or one-bead-one-compound (OBOC) combinatorial library (Lam et al., Nature, 354:82-84, 1991). Examples of a peptide or peptidomimetic tethered to a dsRNA agent via an incorporated monomer unit for cell targeting purposes is an arginine-glycine-aspartic acid (RGD)-peptide, or RGD mimic. A peptide moiety can range in length from about 5 amino acids to about 40 amino acids. The peptide moieties can have a structural modification, such as to increase stability or direct conformational properties. Any of the structural modifications described below can be utilized.

[0557] An RGD peptide for use in the compositions and methods of the invention may be linear or cyclic, and may be modified, e.g., glycosylated or methylated, to facilitate targeting to a specific tissue(s). RGD-containing peptides and peptidiomimemtics may include D-amino acids, as well as synthetic RGD mimics. In addition to RGD, one can use other moieties that target the integrin ligand. Preferred conjugates of this ligand target PECAM-1 or VEGF.

[0558] A “cell permeation peptide” is capable of permeating a cell, e.g., a microbial cell, such as a bacterial or fungal cell, or a mammalian cell, such as a human cell. A microbial cell-permeating peptide can be, for example, a α-helical linear peptide (e.g., LL-37 or Ceropin P1), a disulfide bond-containing peptide (e.g., α-defensin, β-defensin or bactenecin), or a peptide containing only one or two dominating amino acids (e.g., PR-39 or indolicidin). A cell permeation peptide can also include a nuclear localization signal (NLS). For example, a cell permeation peptide can be a bipartite amphipathic peptide, such as MPG, which is derived from the fusion peptide domain of HIV-1 gp41 and the NLS of SV40 large T antigen (Simeoni et al., Nucl. Acids Res. 31:2717-2724, 2003).

### C. Carbohydrate Conjugates

[0559] In some embodiments of the compositions and methods of the invention, an iRNA oligonucleotide further comprises a carbohydrate. The carbohydrate conjugated iRNA are advantageous for the in vivo delivery of nucleic acids, as well as compositions suitable for in vivo therapeutic use, as described herein. As used herein, “carbohydrate” refers to a compound which is either a carbohydrate per se made up of one or more monosaccharide units having at least 6 carbon atoms (which can be linear, branched or cyclic) with an oxygen, nitrogen or sulfur atom bonded to each carbon atom; or a compound having as a part thereof a carbohydrate moiety made up of one or more monosaccharide units each having at least six carbon atoms (which can be linear, branched or cyclic), with an oxygen, nitrogen or sulfur atom bonded to each carbon atom. Representative carbohydrates include the sugars (mono-, di-, tri- and oligosaccharides containing from about 4, 5, 6, 7, 8, or 9 monosaccharide units), and polysaccharides such as starches, glycogen, cellulose and polysaccharide gums. Specific monosaccharides include C5 and above (e.g., C5, C6, C7, or C8) sugars; di- and trisaccharides include sugars having two or three monosaccharide units (e.g., C5, C6, C7, or C8).

[0560] In one embodiment, a carbohydrate conjugate for use in the compositions and methods of the invention is a monosaccharide. In one embodiment, the monosaccharide is an N-acetylgalactosamine, such as

[chemical structure]

[0561] In another embodiment, a carbohydrate conjugate for use in the compositions and methods of the invention is selected from the group consisting of:

[chemical structure]

[chemical structure]

[chemical structure]

[chemical structure]

[chemical structure]

[0562] Another representative carbohydrate conjugate for use in the embodiments described herein includes, but is not limited to,

[chemical structure]

[0563] (Formula XXIII), when one of X or Y is an oligonucleotide, the other is a hydrogen.

[0564] In some embodiments, the carbohydrate conjugate further comprises one or more additional ligands as described above, such as, but not limited to, a PK modulator and/or a cell permeation peptide.

### D. Linkers

[0565] In some embodiments, the conjugate or ligand described herein can be attached to an iRNA oligonucleotide with various linkers that can be cleavable or non-cleavable.

[0566] The term “linker” or “linking group” means an organic moiety that connects two parts of a compound, e.g., covalently attaches two parts of a compound. Linkers typically comprise a direct bond or an atom such as oxygen or sulfur, a unit such as NR8, C(O), C(O) NH, SO, SO₂, SO₂NH or a chain of atoms, such as, but not limited to, substituted or unsubstituted alkyl, substituted or unsubstituted alkenyl, substituted or unsubstituted alkynyl, arylalkyl, arylalkenyl, arylalkynyl, heteroarylalkyl, heteroarylalkenyl, heteroarylalkynyl, heterocyclylalkyl, heterocyclylalkenyl, heterocyclylalkynyl, aryl, heteroaryl, heterocyclyl, cycloalkyl, cycloalkenyl, alkylarylalkyl, alkylarylalkenyl, alkylarylalkynyl, alkenylarylalkyl, alkenylarylalkenyl, alkenylarylalkynyl, alkynylarylalkyl, alkynylarylalkenyl, alkynylarylalkynyl, alkylheteroarylalkyl, alkylheteroarylalkenyl, alkylheteroarylalkynyl, alkenylheteroarylalkyl, alkenylheteroarylalkenyl, alkenylheteroarylalkynyl, alkynylheteroarylalkyl, alkynylheteroarylalkenyl, alkynylheteroarylalkynyl, alkylheterocyclylalkyl, alkylheterocyclylalkenyl, alkylhererocyclylalkynyl, alkenylheterocyclylalkyl, alkenylheterocyclylalkenyl, alkenylheterocyclylalkynyl, alkynylheterocyclylalkyl, alkynylheterocyclylalkenyl, alkynylheterocyclylalkynyl, alkylaryl, alkenylaryl, alkynylaryl, alkylheteroaryl, alkenylheteroaryl, alkynylhereroaryl, which one or more methylenes can be interrupted or terminated by O, S, S(O), SO₂, N(R8), C(O), substituted or unsubstituted aryl, substituted or unsubstituted heteroaryl, substituted or unsubstituted heterocyclic; where R8 is hydrogen, acyl, aliphatic or substituted aliphatic. In one embodiment, the linker is between about 1-24 atoms, 2-24, 3-24, 4-24, 5-24, 6-24, 6-18, 7-18, 8-18 atoms, 7-17, 8-17, 6-16, 7-16, or 8-16 atoms.

[0567] A cleavable linking group is one which is sufficiently stable outside the cell, but which upon entry into a target cell is cleaved to release the two parts the linker is holding together. In a preferred embodiment, the cleavable linking group is cleaved at least about 10 times, 20, times, 30 times, 40 times, 50 times, 60 times, 70 times, 80 times, 90 times or more, or at least about 100 times faster in a target cell or under a first reference condition (which can, e.g., be selected to mimic or represent intracellular conditions) than in the blood of a subject, or under a second reference condition (which can, e.g., be selected to mimic or represent conditions found in the blood or serum).

[0568] Cleavable linking groups are susceptible to cleavage agents, e.g., pH, redox potential or the presence of degradative molecules. Generally, cleavage agents are more prevalent or found at higher levels or activities inside cells than in serum or blood. Examples of such degradative agents include: redox agents which are selected for particular substrates or which have no substrate specificity, including, e.g., oxidative or reductive enzymes or reductive agents such as mercaptans, present in cells, that can degrade a redox cleavable linking group by reduction; esterases; endosomes or agents that can create an acidic environment, e.g., those that result in a pH of five or lower; enzymes that can hydrolyze or degrade an acid cleavable linking group by acting as a general acid, peptidases (which can be substrate specific), and phosphatases.

[0569] A cleavable linkage group, such as a disulfide bond can be susceptible to pH. The pH of human serum is 7.4, while the average intracellular pH is slightly lower, ranging from about 7.1-7.3. Endosomes have a more acidic pH, in the range of 5.5-6.0, and lysosomes have an even more acidic pH at around 5.0. Some linkers will have a cleavable linking group that is cleaved at a preferred pH, thereby releasing a cationic lipid from the ligand inside the cell, or into the desired compartment of the cell.

[0570] A linker can include a cleavable linking group that is cleavable by a particular enzyme. The type of cleavable linking group incorporated into a linker can depend on the cell to be targeted. For example, a liver-targeting ligand can be linked to a cationic lipid through a linker that includes an ester group. Liver cells are rich in esterases, and therefore the linker will be cleaved more efficiently in liver cells than in cell types that are not esterase-rich. Other cell-types rich in esterases include cells of the lung, renal cortex, and testis.

[0571] Linkers that contain peptide bonds can be used when targeting cell types rich in peptidases, such as liver cells and synoviocytes.

[0572] In general, the suitability of a candidate cleavable linking group can be evaluated by testing the ability of a degradative agent (or condition) to cleave the candidate linking group. It will also be desirable to also test the candidate cleavable linking group for the ability to resist cleavage in the blood or when in contact with other non-target tissue. Thus, one can determine the relative susceptibility to cleavage between a first and a second condition, where the first is selected to be indicative of cleavage in a target cell and the second is selected to be indicative of cleavage in other tissues or biological fluids, e.g., blood or serum. The evaluations can be carried out in cell free systems, in cells, in cell culture, in organ or tissue culture, or in whole animals. It can be useful to make initial evaluations in cell-free or culture conditions and to confirm by further evaluations in whole animals. In preferred embodiments, useful candidate compounds are cleaved at least about 2, 4, 10, 20, 30, 40, 50, 60, 70, 80, 90, or about 100 times faster in the cell (or under in vitro conditions selected to mimic intracellular conditions) as compared to blood or serum (or under in vitro conditions selected to mimic extracellular conditions).

i. Redox Cleavable Linking Groups

[0573] In one embodiment, a cleavable linking group is a redox cleavable linking group that is cleaved upon reduction or oxidation. An example of reductively cleavable linking group is a disulphide linking group (—S—S—). To determine if a candidate cleavable linking group is a suitable “reductively cleavable linking group,” or for example is suitable for use with a particular iRNA moiety and particular targeting agent one can look to methods described herein. For example, a candidate can be evaluated by incubation with dithiothreitol (DTT), or other reducing agent using reagents know in the art, which mimic the rate of cleavage which would be observed in a cell, e.g., a target cell. The candidates can also be evaluated under conditions which are selected to mimic blood or serum conditions. In one, candidate compounds are cleaved by at most about 10% in the blood. In other embodiments, useful candidate compounds are degraded at least about 2, 4, 10, 20, 30, 40, 50, 60, 70, 80, 90, or about 100 times faster in the cell (or under in vitro conditions selected to mimic intracellular conditions) as compared to blood (or under in vitro conditions selected to mimic extracellular conditions). The rate of cleavage of candidate compounds can be determined using standard enzyme kinetics assays under conditions chosen to mimic intracellular media and compared to conditions chosen to mimic extracellular media.

ii. Phosphate-Based Cleavable Linking Groups

[0574] In another embodiment, a cleavable linker comprises a phosphate-based cleavable linking group. A phosphate-based cleavable linking group is cleaved by agents that degrade or hydrolyze the phosphate group. An example of an agent that cleaves phosphate groups in cells are enzymes such as phosphatases in cells. Examples of phosphate-based linking groups are —O—P(O) (ORk)-O—, —O—P(S)(ORk)-O—, —O—P(S)(SRk)-O—, —S—P(O)(ORk)-O—, —O—P(O)(ORk)-S—, —S—P(O)(ORk)-S—, —O—P(S)(ORk)-S—, —S—P(S)(ORk)-O—, —O—P(O)(Rk)-O—, —O—P(S)(Rk)-O—, —S—P(O)(Rk)-O—, —S—P(S)(Rk)-O—, —S—P(O)(Rk)-S—, —O—P(S)(Rk)-S—. Preferred embodiments are —O—P(O)(OH)—O—, —O—P(S)(OH)—O—, —O—P(S)(SH)—O—, —S—P(O)(OH)—O—, —O—P(O)(OH)—S—, —S—P(O)(OH)-S—, —O—P(S)(OH)—S—, —S—P(S)(OH)—O—, —O—P(O)(H)—O—, —O—P(S)(H)—O—, —S—P(O)(H)—O, —S—P(S)(H)—O—, —S—P(O)(H)—S—, μ-O—P(S)(H)—S—. A preferred embodiment is —O—P(O)(OH)—O—. These candidates can be evaluated using methods analogous to those described above.

iii. Acid Cleavable Linking Groups

[0575] In another embodiment, a cleavable linker comprises an acid cleavable linking group. An acid cleavable linking group is a linking group that is cleaved under acidic conditions. In preferred embodiments acid cleavable linking groups are cleaved in an acidic environment with a pH of about 6.5 or lower (e.g., about 6.0, 5.75, 5.5, 5.25, 5.0, or lower), or by agents such as enzymes that can act as a general acid. In a cell, specific low pH organelles, such as endosomes and lysosomes can provide a cleaving environment for acid cleavable linking groups. Examples of acid cleavable linking groups include but are not limited to hydrazones, esters, and esters of amino acids. Acid cleavable groups can have the general formula —C═NN—, C(O)O, or μ-OC(O). A preferred embodiment is when the carbon attached to the oxygen of the ester (the alkoxy group) is an aryl group, substituted alkyl group, or tertiary alkyl group such as dimethyl pentyl or t-butyl. These candidates can be evaluated using methods analogous to those described above.

iv. Ester-Based Linking Groups

[0576] In another embodiment, a cleavable linker comprises an ester-based cleavable linking group. An ester-based cleavable linking group is cleaved by enzymes such as esterases and amidases in cells. Examples of ester-based cleavable linking groups include but are not limited to esters of alkylene, alkenylene and alkynylene groups. Ester cleavable linking groups have the general formula-C(O)O—, or —OC(O)—. These candidates can be evaluated using methods analogous to those described above.

v. Peptide-Based Cleaving Groups

[0577] In yet another embodiment, a cleavable linker comprises a peptide-based cleavable linking group. A peptide-based cleavable linking group is cleaved by enzymes such as peptidases and proteases in cells. Peptide-based cleavable linking groups are peptide bonds formed between amino acids to yield oligopeptides (e.g., dipeptides, tripeptides etc.) and polypeptides. Peptide-based cleavable groups do not include the amide group (—C(O) NH—). The amide group can be formed between any alkylene, alkenylene or alkynelene. A peptide bond is a special type of amide bond formed between amino acids to yield peptides and proteins. The peptide based cleavage group is generally limited to the peptide bond (i.e., the amide bond) formed between amino acids yielding peptides and proteins and does not include the entire amide functional group. Peptide-based cleavable linking groups have the general formula —NHCHRAC (O) NHCHRBC(O)—, where RA and RB are the R groups of the two adjacent amino acids. These candidates can be evaluated using methods analogous to those described above.

[0578] In one embodiment, an iRNA of the invention is conjugated to a carbohydrate through a linker. Non-limiting examples of iRNA carbohydrate conjugates with linkers of the compositions and methods of the invention include, but are not limited to.

[chemical structure]

[chemical structure]

[chemical structure]

[0579] when one of X or Y is an oligonucleotide, the other is a hydrogen.

[0580] In certain embodiments of the compositions and methods of the invention, a ligand is one or more “GalNAc” (N-acetylgalactosamine) derivatives attached through a bivalent or trivalent branched linker.

[0581] In one embodiment, a dsRNA of the invention is conjugated to a bivalent or trivalent branched linker selected from the group of structures shown in any of formula (XXXII)-(XXXV):

[chemical structure]

[0582] wherein:
[0583] q2A, q2B, q3A, q3B, q4A, q4B, q5A, q5B and q5C represent independently for each occurrence 0-20 and wherein the repeating unit can be the same or different;
[0584] P^{2A}, P^{2B}, P^{3A}, P^{3B}, P^{4A}, P^{4B}, P^{5A}, P^{5B}, P^{5C}, T^{2A}, T^{2B}, T^{3A}, T^{3B}, T^{4A}, T^{4B}, T^{4A}, T^{5B}, T^{5C} are each independently for each occurrence absent, CO, NH, O, S, OC(O), NHC(O), CH₂, CH₂NH or CH₂O;
[0585] Q^{2A}, Q^{2B}, Q^{3A}, Q^{3B}, Q^{4A}, Q^{4B}, Q^{5A}, Q^{5B}, Q^{5C} are independently for each occurrence absent, alkylene, substituted alkylene wherin one or more methylenes can be interrupted or terminated by one or more of O, S, S(O), SO₂, N(R^{N}), C(R′)═C(R″), C≡C or C (O); R^{2A}, R^{2B}, R^{3A}, R^{3B}, R^{4A}, R^{4B}, R^{5A}, R^{5B}, R^{5C} are each independently for each occurrence absent, NH, O, S, CH₂, C(O) O, C(O) NH, NHCH(R^{a}) C(O), —C(O)-CH(R^{a})-NH—, CO, CH═N-O,

[chemical structure]

or heterocyclyl;
[0586] L^{2A}, L^{2B}, L^{3A}, L^{3B}, L^{4A}, L^{4B}, L^{5A}, L^{5B} and L^{5C} represent the ligand; i.e. each independently for each occurrence a monosaccharide (such as GalNAc), disaccharide, trisaccharide, tetrasaccharide, oligosaccharide, or polysaccharide; and R^{a} is H or amino acid side chain. Trivalent conjugating GalNAc derivatives are particularly useful for use with RNAi agents for inhibiting the expression of a target gene, such as those of formula (XXXV):

[chemical structure]

[0587] wherein L^{5A}, L^{5B} and L^{5C} represent a monosaccharide, such as GalNAc derivative.

[0588] Examples of suitable bivalent and trivalent branched linker groups conjugating GalNAc derivatives include, but are not limited to, the structures recited above as formulas II, VII, XI, X, and XIII.

[0589] Representative U.S. patents that teach the preparation of RNA conjugates include, but are not limited to, U.S. Pat. Nos. 4,828,979; 4,948,882; 5,218,105; 5,525,465; 5,541,313; 5,545,730; 5,552,538; 5,578,717, 5,580,731; 5,591,584; 5,109,124; 5,118,802; 5,138,045; 5,414,077; 5,486,603; 5,512,439; 5,578,718; 5,608,046; 4,587,044; 4,605,735; 4,667,025; 4,762,779; 4,789,737; 4,824,941; 4,835,263; 4,876,335; 4,904,582; 4,958,013; 5,082,830; 5,112,963; 5,214,136; 5,082,830; 5,112,963; 5,214,136; 5,245,022; 5,254,469; 5,258,506; 5,262,536; 5,272,250; 5,292,873; 5,317,098; 5,371,241, 5,391,723; 5,416,203, 5,451,463; 5,510,475; 5,512,667; 5,514,785; 5,565,552; 5,567,810; 5,574, 142; 5,585,481; 5,587,371; 5,595,726; 5,597,696; 5,599,923; 5,599,928 and 5,688,941; 6,294,664; 6,320,017; 6,576,752; 6,783,931; 6,900,297; 7,037,646; 8,106,022, the entire contents of each of which are hereby incorporated herein by reference.

[0590] It is not necessary for all positions in a given compound to be uniformly modified, and in fact more than one of the aforementioned modifications can be incorporated in a single compound or even at a single nucleoside within an iRNA. The present invention also includes iRNA compounds that are chimeric compounds.

[0591] “Chimeric” iRNA compounds or “chimeras,” in the context of this invention, are iRNA compounds, preferably dsRNAs, which contain two or more chemically distinct regions, each made up of at least one monomer unit, i.e., a nucleotide in the case of a dsRNA compound. These iRNAs typically contain at least one region wherein the RNA is modified so as to confer upon the iRNA increased resistance to nuclease degradation, increased cellular uptake, and/or increased binding affinity for the target nucleic acid. An additional region of the iRNA can serve as a substrate for enzymes capable of cleaving RNA:DNA or RNA:RNA hybrids. By way of example, RNase H is a cellular endonuclease which cleaves the RNA strand of an RNA:DNA duplex. Activation of RNase H, therefore, results in cleavage of the RNA target, thereby greatly enhancing the efficiency of iRNA inhibition of gene expression. Consequently, comparable results can often be obtained with shorter iRNAs when chimeric dsRNAs are used, compared to phosphorothioate deoxy dsRNAs hybridizing to the same target region. Cleavage of the RNA target can be routinely detected by gel electrophoresis and, if necessary, associated nucleic acid hybridization techniques known in the art.

[0592] In certain instances, the RNA of an iRNA can be modified by a non-ligand group. A number of non-ligand molecules have been conjugated to iRNAs in order to enhance the activity, cellular distribution or cellular uptake of the iRNA, and procedures for performing such conjugations are available in the scientific literature. Such non-ligand moieties have included lipid moieties, such as cholesterol (Kubo, T. et al., Biochem. Biophys. Res. Comm., 2007, 365 (1): 54-61; Letsinger et al., Proc. Natl. Acad. Sci. USA, 1989, 86:6553), cholic acid (Manoharan et al., Bioorg. Med. Chem. Lett., 1994, 4:1053), a thioether, e.g., hexyl-S-tritylthiol (Manoharan et al., Ann. N.Y. Acad. Sci., 1992, 660:306; Manoharan et al., Bioorg. Med. Chem. Let., 1993, 3:2765), a thiocholesterol (Oberhauser et al., Nucl. Acids Res., 1992, 20:533), an aliphatic chain, e.g., dodecandiol or undecyl residues (Saison-Behmoaras et al., EMBO) J., 1991, 10:111; Kabanov et al., FEBS Lett., 1990, 259:327; Svinarchuk et al., Biochimie, 1993, 75:49), a phospholipid, e.g., di-hexadecyl-rac-glycerol or triethylammonium 1,2-di-O-hexadecyl-rac-glycero-3-H-phosphonate (Manoharan et al., Tetrahedron Lett., 1995, 36:3651; Shea et al., Nucl. Acids Res., 1990, 18:3777), a polyamine or a polyethylene glycol chain (Manoharan et al., Nucleosides & Nucleotides, 1995, 14:969), or adamantane acetic acid (Manoharan et al., Tetrahedron Lett., 1995, 36:3651), a palmityl moiety (Mishra et al., Biochim. Biophys. Acta, 1995, 1264:229), or an octadecylamine or hexylamino-carbonyl-oxycholesterol moiety (Crooke et al., J. Pharmacol. Exp. Ther., 1996, 277:923). Representative United States patents that teach the preparation of such RNA conjugates have been listed above. Typical conjugation protocols involve the synthesis of an RNAs bearing an aminolinker at one or more positions of the sequence. The amino group is then reacted with the molecule being conjugated using appropriate coupling or activating reagents. The conjugation reaction can be performed either with the RNA still bound to the solid support or following cleavage of the RNA, in solution phase. Purification of the RNA conjugate by HPLC typically affords the pure conjugate.

### V. Delivery of an iRNA of the Invention

[0593] The delivery of an iRNA of the invention to a cell e.g., a cell within a subject, such as a human subject (e.g., a subject in need thereof, such as a subject having a complement component-associated disease as described herein) can be achieved in a number of different ways. For example, delivery may be performed by contacting a cell with an iRNA of the invention either in vitro or in vivo. In vivo delivery may also be performed directly by administering a composition comprising an iRNA, e.g., a dsRNA, to a subject. Alternatively, in vivo delivery may be performed indirectly by administering one or more vectors that encode and direct the expression of the iRNA. These alternatives are discussed further below.

[0594] In general, any method of delivering a nucleic acid molecule (in vitro or in vivo) can be adapted for use with an iRNA of the invention (see e.g., Akhtar S. and Julian R L. (1992) Trends Cell. Biol. 2 (5): 139-144 and WO94/02595, which are incorporated herein by reference in their entireties). For in vivo delivery, factors to consider in order to deliver an iRNA molecule include, for example, biological stability of the delivered molecule, prevention of non-specific effects, and accumulation of the delivered molecule in the target tissue. The non-specific effects of an iRNA can be minimized by local administration, for example, by direct injection or implantation into a tissue or topically administering the preparation. Local administration to a treatment site maximizes local concentration of the agent, limits the exposure of the agent to systemic tissues that can otherwise be harmed by the agent or that can degrade the agent, and permits a lower total dose of the iRNA molecule to be administered. Several studies have shown successful knockdown of gene products when an iRNA is administered locally. For example, intraocular delivery of a VEGF dsRNA by intravitreal injection in cynomolgus monkeys (Tolentino, M J., et al (2004) Retina 24:132-138) and subretinal injections in mice (Reich, S J., et al (2003) Mol. Vis. 9:210-216) were both shown to prevent neovascularization in an experimental model of age-related macular degeneration. In addition, direct intratumoral injection of a dsRNA in mice reduces tumor volume (Pille, J., et al (2005) Mol. Ther. 11:267-274) and can prolong survival of tumor-bearing mice (Kim, W J., et al (2006) Mol. Ther. 14:343-350; Li, S., et al (2007) Mol. Ther. 15:515-523). RNA interference has also shown success with local delivery to the CNS by direct injection (Dorn, G., et al. (2004) Nucleic Acids 32: e49; Tan, P H., et al (2005) Gene Ther. 12:59-66; Makimura, H., et al (2002) BMC Neurosci. 3:18; Shishkina, G T., et al (2004) Neuroscience 129:521-528; Thakker, E R., et al (2004) Proc. Natl. Acad. Sci. U.S.A. 101:17270-17275; Akaneya, Y., et al (2005) J. Neurophysiol. 93:594-602) and to the lungs by intranasal administration (Howard, K A., et al (2006) Mol. Ther. 14:476-484; Zhang, X., et al (2004) J. Biol. Chem. 279:10677-10684; Bitko, V., et al (2005) Nat. Med. 11:50-55). For administering an iRNA systemically for the treatment of a disease, the RNA can be modified or alternatively delivered using a drug delivery system; both methods act to prevent the rapid degradation of the dsRNA by endo- and exo-nucleases in vivo. Modification of the RNA or the pharmaceutical carrier can also permit targeting of the iRNA composition to the target tissue and avoid undesirable off-target effects. iRNA molecules can be modified by chemical conjugation to lipophilic groups such as cholesterol to enhance cellular uptake and prevent degradation. For example, an iRNA directed against ApoB conjugated to a lipophilic cholesterol moiety was injected systemically into mice and resulted in knockdown of apoB mRNA in both the liver and jejunum (Soutschek, J., et al (2004) Nature 432:173-178). Conjugation of an iRNA to an aptamer has been shown to inhibit tumor growth and mediate tumor regression in a mouse model of prostate cancer (McNamara, J O., et al (2006) Nat. Biotechnol. 24:1005-1015). In an alternative embodiment, the iRNA can be delivered using drug delivery systems such as a nanoparticle, a dendrimer, a polymer, liposomes, or a cationic delivery system. Positively charged cationic delivery systems facilitate binding of an iRNA molecule (negatively charged) and also enhance interactions at the negatively charged cell membrane to permit efficient uptake of an iRNA by the cell. Cationic lipids, dendrimers, or polymers can either be bound to an iRNA, or induced to form a vesicle or micelle (see e.g., Kim S H., et al (2008) Journal of Controlled Release 129 (2): 107-116) that encases an iRNA. The formation of vesicles or micelles further prevents degradation of the iRNA when administered systemically. Methods for making and administering cationic-iRNA complexes are well within the abilities of one skilled in the art (see e.g., Sorensen, D R., et al (2003) J. Mol. Biol 327:761-766; Verma, U N., et al (2003) Clin. Cancer Res. 9:1291-1300; Arnold, A S et al (2007) J. Hypertens. 25:197-205, which are incorporated herein by reference in their entirety). Some non-limiting examples of drug delivery systems useful for systemic delivery of iRNAs include DOTAP (Sorensen, D R., et al (2003), supra; Verma, U N., et al (2003), supra), Oligofectamine, “solid nucleic acid lipid particles” (Zimmermann, T S., et al (2006) Nature 441:111-114), cardiolipin (Chien, P Y., et al (2005) Cancer Gene Ther. 12:321-328; Pal, A., et al (2005) Int J. Oncol. 26:1087-1091), polyethyleneimine (Bonnet M E., et al (2008) Pharm. Res. August 16 Epub ahead of print; Aigner, A. (2006) J. Biomed. Biotechnol. 71659), Arg-Gly-Asp (RGD) peptides (Liu, S. (2006) Mol. Pharm. 3:472-487), and polyamidoamines (Tomalia, D A., et al (2007) Biochem. Soc. Trans. 35:61-67; Yoo, H., et al (1999) Pharm. Res. 16:1799-1804). In some embodiments, an iRNA forms a complex with cyclodextrin for systemic administration. Methods for administration and pharmaceutical compositions of iRNAs and cyclodextrins can be found in U.S. Pat. No. 7,427,605, which is herein incorporated by reference in its entirety.

A. Vector Encoded iRNAs of the Invention

[0595] iRNA targeting a CFB, C3, or C9 gene can be expressed from transcription units inserted into DNA or RNA vectors (see, e.g., Couture, A, et al., TIG. (1996), 12:5-10; Skillern, A., et al., International PCT Publication No. WO 00/22113, Conrad, International PCT Publication No. WO 00/22114, and Conrad, U.S. Pat. No. 6,054,299). Expression can be transient (on the order of hours to weeks) or sustained (weeks to months or longer), depending upon the specific construct used and the target tissue or cell type. These transgenes can be introduced as a linear construct, a circular plasmid, or a viral vector, which can be an integrating or non-integrating vector. The transgene can also be constructed to permit it to be inherited as an extrachromosomal plasmid (Gassmann, et al., Proc. Natl. Acad. Sci. USA (1995) 92:1292).

[0596] The individual strand or strands of an iRNA can be transcribed from a promoter on an expression vector. Where two separate strands are to be expressed to generate, for example, a dsRNA, two separate expression vectors can be co-introduced (e.g., by transfection or infection) into a target cell. Alternatively each individual strand of a dsRNA can be transcribed by promoters both of which are located on the same expression plasmid. In one embodiment, a dsRNA is expressed as inverted repeat polynucleotides joined by a linker polynucleotide sequence such that the dsRNA has a stem and loop structure.

[0597] iRNA expression vectors are generally DNA plasmids or viral vectors. Expression vectors compatible with eukaryotic cells, preferably those compatible with vertebrate cells, can be used to produce recombinant constructs for the expression of an iRNA as described herein. Eukaryotic cell expression vectors are well known in the art and are available from a number of commercial sources. Typically, such vectors are provided containing convenient restriction sites for insertion of the desired nucleic acid segment. Delivery of iRNA expressing vectors can be systemic, such as by intravenous or intramuscular administration, by administration to target cells ex-planted from the patient followed by reintroduction into the patient, or by any other means that allows for introduction into a desired target cell.

[0598] iRNA expression plasmids can be transfected into target cells as a complex with cationic lipid carriers (e.g., Oligofectamine) or non-cationic lipid-based carriers (e.g., Transit-TKO™). Multiple lipid transfections for iRNA-mediated knockdowns targeting different regions of a target RNA over a period of a week or more are also contemplated by the invention. Successful introduction of vectors into host cells can be monitored using various known methods. For example, transient transfection can be signaled with a reporter, such as a fluorescent marker, such as Green Fluorescent Protein (GFP). Stable transfection of cells ex vivo can be ensured using markers that provide the transfected cell with resistance to specific environmental factors (e.g., antibiotics and drugs), such as hygromycin B resistance.

[0599] Viral vector systems which can be utilized with the methods and compositions described herein include, but are not limited to, (a) adenovirus vectors; (b) retrovirus vectors, including but not limited to lentiviral vectors, moloney murine leukemia virus, etc.; (c) adeno-associated virus vectors; (d) herpes simplex virus vectors; (e) SV 40 vectors; (f) polyoma virus vectors; (g) papilloma virus vectors; (h) picornavirus vectors; (i) pox virus vectors such as an orthopox, e.g., vaccinia virus vectors or avipox, e.g. canary pox or fowl pox; and (j) a helper-dependent or gutless adenovirus. Replication-defective viruses can also be advantageous. Different vectors will or will not become incorporated into the cells' genome. The constructs can include viral sequences for transfection, if desired. Alternatively, the construct can be incorporated into vectors capable of episomal replication, e.g. EPV and EBV vectors. Constructs for the recombinant expression of an iRNA will generally require regulatory elements, e.g., promoters, enhancers, etc., to ensure the expression of the iRNA in target cells. Other aspects to consider for vectors and constructs are further described below.

[0600] Vectors useful for the delivery of an iRNA will include regulatory elements (promoter, enhancer, etc.) sufficient for expression of the iRNA in the desired target cell or tissue. The regulatory elements can be chosen to provide either constitutive or regulated/inducible expression.

[0601] Expression of the iRNA can be precisely regulated, for example, by using an inducible regulatory sequence that is sensitive to certain physiological regulators, e.g., circulating glucose levels, or hormones (Docherty et al., 1994, FASEB J. 8:20-24). Such inducible expression systems, suitable for the control of dsRNA expression in cells or in mammals include, for example, regulation by ecdysone, by estrogen, progesterone, tetracycline, chemical inducers of dimerization, and isopropyl-beta-DI-thiogalactopyranoside (IPTG). A person skilled in the art would be able to choose the appropriate regulatory/promoter sequence based on the intended use of the iRNA transgene.

[0602] Viral vectors that contain nucleic acid sequences encoding an iRNA can be used. For example, a retroviral vector can be used (see Miller et al., Meth. Enzymol. 217:581-599 (1993)). These retroviral vectors contain the components necessary for the correct packaging of the viral genome and integration into the host cell DNA. The nucleic acid sequences encoding an iRNA are cloned into one or more vectors, which facilitate delivery of the nucleic acid into a patient. More detail about retroviral vectors can be found, for example, in Boesen et al., Biotherapy 6:291-302 (1994), which describes the use of a retroviral vector to deliver the mdr1 gene to hematopoietic stem cells in order to make the stem cells more resistant to chemotherapy. Other references illustrating the use of retroviral vectors in gene therapy are: Clowes et al., J. Clin. Invest. 93:644-651 (1994); Kiem et al., Blood 83:1467-1473 (1994); Salmons and Gunzberg, Human Gene Therapy 4:129-141 (1993); and Grossman and Wilson, Curr. Opin. in Genetics and Devel. 3:110-114 (1993). Lentiviral vectors contemplated for use include, for example, the HIV based vectors described in U.S. Pat. Nos. 6,143,520; 5,665,557; and 5,981,276, which are herein incorporated by reference.

[0603] Adenoviruses are also contemplated for use in delivery of iRNAs of the invention. Adenoviruses are especially attractive vehicles, e.g., for delivering genes to respiratory epithelia. Adenoviruses naturally infect respiratory epithelia where they cause a mild disease. Other targets for adenovirus-based delivery systems are liver, the central nervous system, endothelial cells, and muscle. Adenoviruses have the advantage of being capable of infecting non-dividing cells. Kozarsky and Wilson, Current Opinion in Genetics and Development 3:499-503 (1993) present a review of adenovirus-based gene therapy. Bout et al., Human Gene Therapy 5:3-10 (1994) demonstrated the use of adenovirus vectors to transfer genes to the respiratory epithelia of rhesus monkeys. Other instances of the use of adenoviruses in gene therapy can be found in Rosenfeld et al., Science 252:431-434 (1991); Rosenfeld et al., Cell 68:143-155 (1992); Mastrangeli et al., J. Clin. Invest. 91:225-234 (1993); PCT Publication WO94/12649; and Wang, et al., Gene Therapy 2:775-783 (1995). A suitable AV vector for expressing an iRNA featured in the invention, a method for constructing the recombinant AV vector, and a method for delivering the vector into target cells, are described in Xia H et al. (2002), Nat. Biotech. 20:1006-1010.

[0604] Adeno-associated virus (AAV) vectors may also be used to delivery an iRNA of the invention (Walsh et al., Proc. Soc. Exp. Biol. Med. 204:289-300 (1993); U.S. Pat. No. 5,436,146). In one embodiment, the iRNA can be expressed as two separate, complementary single-stranded RNA molecules from a recombinant AAV vector having, for example, either the U6 or H1 RNA promoters, or the cytomegalovirus (CMV) promoter. Suitable AAV vectors for expressing the dsRNA featured in the invention, methods for constructing the recombinant AV vector, and methods for delivering the vectors into target cells are described in Samulski R et al. (1987), J. Virol. 61:3096-3101; Fisher K J et al. (1996), J. Virol, 70:520-532; Samulski R et al. (1989), J. Virol. 63:3822-3826; U.S. Pat. Nos. 5,252,479; 5,139,941; International Patent Application No. WO 94/13788; and International Patent Application No. WO 93/24641, the entire disclosures of which are herein incorporated by reference.

[0605] Another viral vector suitable for delivery of an iRNA of the inevtion is a pox virus such as a vaccinia virus, for example an attenuated vaccinia such as Modified Virus Ankara (MVA) or NYVAC, an avipox such as fowl pox or canary pox.

[0606] The tropism of viral vectors can be modified by pseudotyping the vectors with envelope proteins or other surface antigens from other viruses, or by substituting different viral capsid proteins, as appropriate. For example, lentiviral vectors can be pseudotyped with surface proteins from vesicular stomatitis virus (VSV), rabies, Ebola, Mokola, and the like. AAV vectors can be made to target different cells by engineering the vectors to express different capsid protein serotypes; see, e.g., Rabinowitz J E et al. (2002), J Virol 76:791-801, the entire disclosure of which is herein incorporated by reference.

[0607] The pharmaceutical preparation of a vector can include the vector in an acceptable diluent, or can include a slow release matrix in which the gene delivery vehicle is imbedded. Alternatively, where the complete gene delivery vector can be produced intact from recombinant cells, e.g., retroviral vectors, the pharmaceutical preparation can include one or more cells which produce the gene delivery system.

### VI. Pharmaceutical Compositions of the Invention

[0608] The present invention also includes pharmaceutical compositions and formulations which include the iRNAs of the invention. In one embodiment, provided herein are pharmaceutical compositions containing an iRNA, as described herein, and a pharmaceutically acceptable carrier. The pharmaceutical compositions containing the iRNA are useful for treating a disease or disorder associated with the expression or activity of a CFB, C3, and/or C9 gene, e.g. a complement component-associated disease as descried herein. Such pharmaceutical compositions are formulated based on the mode of delivery. One example is compositions that are formulated for systemic administration via parenteral delivery, e.g., by subcutaneous (SC) or intravenous (IV) delivery. Another example is compositions that are formulated for direct delivery into the brain parenchyma, e.g., by infusion into the brain, such as by continuous pump infusion. The pharmaceutical compositions of the invention may be administered in dosages sufficient to inhibit expression of the target gene. In general, a suitable dose of an iRNA of the invention will be in the range of about 0.001 to about 200.0 milligrams per kilogram body weight of the recipient per day, generally in the range of about 1 to 50 mg per kilogram body weight per day. For example, the dsRNA can be administered at about 0.01 mg/kg, about 0.05 mg/kg, about 0.5 mg/kg, about 1 mg/kg, about 1.5 mg/kg, about 2 mg/kg, about 3 mg/kg, about 10 mg/kg, about 20 mg/kg, about 30 mg/kg, about 40 mg/kg, or about 50 mg/kg per single dose.

[0609] For example, the dsRNA may be administered at a dose of about 0.1, 0.2, 0.3, 0.4, 0.5, 0.6, 0.7, 0.8, 0.9, 1, 1.1, 1.2, 1.3, 1.4, 1.5, 1.6, 1.7, 1.8, 1.9, 2, 2.1, 2.2, 2.3, 2.4, 2.5, 2.6, 2.7, 2.8, 2.9, 3, 3.1, 3.2, 3.3, 3.4, 3.5, 3.6, 3.7, 3.8, 3.9, 4, 4.1, 4.2, 4.3, 4.4, 4.5, 4.6, 4.7, 4.8, 4.9, 5, 5.1, 5.2, 5.3, 5.4, 5.5, 5.6, 5.7, 5.8, 5.9, 6, 6.1, 6.2, 6.3, 6.4, 6.5, 6.6, 6.7, 6.8, 6.9, 7, 7.1, 7.2, 7.3, 7.4, 7.5, 7.6, 7.7, 7.8, 7.9, 8, 8.1, 8.2, 8.3, 8.4, 8.5, 8.6, 8.7, 8.8, 8.9, 9, 9.1, 9.2, 9.3, 9.4, 9.5, 9.6, 9.7, 9.8, 9.9, or about 10 mg/kg. Values and ranges intermediate to the recited values are also intended to be part of this invention.

[0610] In another embodiment, the dsRNA is administered at a dose of about 0.1 to about 50 mg/kg, about 0.25 to about 50 mg/kg, about 0.5 to about 50 mg/kg, about 0.75 to about 50 mg/kg, about 1 to about 50 mg/mg, about 1.5 to about 50 mg/kb, about 2 to about 50 mg/kg, about 2.5 to about 50 mg/kg, about 3 to about 50 mg/kg, about 3.5 to about 50 mg/kg, about 4 to about 50 mg/kg, about 4.5 to about 50 mg/kg, about 5 to about 50 mg/kg, about 7.5 to about 50 mg/kg, about 10 to about 50 mg/kg, about 15 to about 50 mg/kg, about 20 to about 50 mg/kg, about 20 to about 50 mg/kg, about 25 to about 50 mg/kg, about 25 to about 50 mg/kg, about 30 to about 50 mg/kg, about 35 to about 50 mg/kg, about 40 to about 50 mg/kg, about 45 to about 50 mg/kg, about 0.1 to about 45 mg/kg, about 0.25 to about 45 mg/kg, about 0.5 to about 45 mg/kg, about 0.75 to about 45 mg/kg, about 1 to about 45 mg/mg, about 1.5 to about 45 mg/kb, about 2 to about 45 mg/kg, about 2.5 to about 45 mg/kg, about 3 to about 45 mg/kg, about 3.5 to about 45 mg/kg, about 4 to about 45 mg/kg, about 4.5 to about 45 mg/kg, about 5 to about 45 mg/kg, about 7.5 to about 45 mg/kg, about 10 to about 45 mg/kg, about 15 to about 45 mg/kg, about 20 to about 45 mg/kg, about 20 to about 45 mg/kg, about 25 to about 45 mg/kg, about 25 to about 45 mg/kg, about 30 to about 45 mg/kg, about 35 to about 45 mg/kg, about 40 to about 45 mg/kg, about 0.1 to about 40 mg/kg, about 0.25 to about 40 mg/kg, about 0.5 to about 40 mg/kg, about 0.75 to about 40 mg/kg, about 1 to about 40 mg/mg, about 1.5 to about 40 mg/kb, about 2 to about 40 mg/kg, about 2.5 to about 40 mg/kg, about 3 to about 40 mg/kg, about 3.5 to about 40 mg/kg, about 4 to about 40 mg/kg, about 4.5 to about 40 mg/kg, about 5 to about 40 mg/kg, about 7.5 to about 40 mg/kg, about 10 to about 40 mg/kg, about 15 to about 40 mg/kg, about 20 to about 40 mg/kg, about 20 to about 40 mg/kg, about 25 to about 40 mg/kg, about 25 to about 40 mg/kg, about 30 to about 40 mg/kg, about 35 to about 40 mg/kg, about 0.1 to about 30 mg/kg, about 0.25 to about 30 mg/kg, about 0.5 to about 30 mg/kg, about 0.75 to about 30 mg/kg, about 1 to about 30 mg/mg, about 1.5 to about 30 mg/kb, about 2 to about 30 mg/kg, about 2.5 to about 30 mg/kg, about 3 to about 30 mg/kg, about 3.5 to about 30 mg/kg, about 4 to about 30 mg/kg, about 4.5 to about 30 mg/kg, about 5 to about 30 mg/kg, about 7.5 to about 30 mg/kg, about 10 to about 30 mg/kg, about 15 to about 30 mg/kg, about 20 to about 30 mg/kg, about 20 to about 30 mg/kg, about 25 to about 30 mg/kg, about 0.1 to about 20 mg/kg, about 0.25 to about 20 mg/kg, about 0.5 to about 20 mg/kg, about 0.75 to about 20 mg/kg, about 1 to about 20 mg/mg, about 1.5 to about 20 mg/kb, about 2 to about 20 mg/kg, about 2.5 to about 20 mg/kg, about 3 to about 20 mg/kg, about 3.5 to about 20 mg/kg, about 4 to about 20 mg/kg, about 4.5 to about 20 mg/kg, about 5 to about 20 mg/kg, about 7.5 to about 20 mg/kg, about 10 to about 20 mg/kg, or about 15 to about 20 mg/kg. Values and ranges intermediate to the recited values are also intended to be part of this invention.

[0611] For example, the dsRNA may be administered at a dose of about 0 . . . 01, 0.02, 0.03, 0.04, 0.05, 0.06, 0.07, 0.08, 0.09, 0.1, 0.2, 0.3, 0.4, 0.5, 0.6, 0.7, 0.8, 0.9, 1, 1.1, 1.2, 1.3, 1.4, 1.5, 1.6, 1.7, 1.8, 1.9, 2, 2.1, 2.2, 2.3, 2.4, 2.5, 2.6, 2.7, 2.8, 2.9, 3, 3.1, 3.2, 3.3, 3.4, 3.5, 3.6, 3.7, 3.8, 3.9, 4, 4.1, 4.2, 4.3, 4.4, 4.5, 4.6, 4.7, 4.8, 4.9, 5, 5.1, 5.2, 5.3, 5.4, 5.5, 5.6, 5.7, 5.8, 5.9, 6, 6.1, 6.2, 6.3, 6.4, 6.5, 6.6, 6.7, 6.8, 6.9, 7, 7.1, 7.2, 7.3, 7.4, 7.5, 7.6, 7.7, 7.8, 7.9, 8, 8.1, 8.2, 8.3, 8.4, 8.5, 8.6, 8.7, 8.8, 8.9, 9, 9.1, 9.2, 9.3, 9.4, 9.5, 9.6, 9.7, 9.8, 9.9, or about 10 mg/kg. Values and ranges intermediate to the recited values are also intended to be part of this invention.

[0612] In another embodiment, the dsRNA is administered at a dose of about 0.5 to about 50 mg/kg, about 0.75 to about 50 mg/kg, about 1 to about 50 mg/mg, about 1.5 to about 50 mg/kb, about 2 to about 50 mg/kg, about 2.5 to about 50 mg/kg, about 3 to about 50 mg/kg, about 3.5 to about 50 mg/kg, about 4 to about 50 mg/kg, about 4.5 to about 50 mg/kg, about 5 to about 50 mg/kg, about 7.5 to about 50 mg/kg, about 10 to about 50 mg/kg, about 15 to about 50 mg/kg, about 20 to about 50 mg/kg, about 20 to about 50 mg/kg, about 25 to about 50 mg/kg, about 25 to about 50 mg/kg, about 30 to about 50 mg/kg, about 35 to about 50 mg/kg, about 40 to about 50 mg/kg, about 45 to about 50 mg/kg, about 0.5 to about 45 mg/kg, about 0.75 to about 45 mg/kg, about 1 to about 45 mg/mg, about 1.5 to about 45 mg/kb, about 2 to about 45 mg/kg, about 2.5 to about 45 mg/kg, about 3 to about 45 mg/kg, about 3.5 to about 45 mg/kg, about 4 to about 45 mg/kg, about 4.5 to about 45 mg/kg, about 5 to about 45 mg/kg, about 7.5 to about 45 mg/kg, about 10 to about 45 mg/kg, about 15 to about 45 mg/kg, about 20 to about 45 mg/kg, about 20 to about 45 mg/kg, about 25 to about 45 mg/kg, about 25 to about 45 mg/kg, about 30 to about 45 mg/kg, about 35 to about 45 mg/kg, about 40 to about 45 mg/kg, about 0.5 to about 40 mg/kg, about 0.75 to about 40 mg/kg, about 1 to about 40 mg/mg, about 1.5 to about 40 mg/kb, about 2 to about 40 mg/kg, about 2.5 to about 40 mg/kg, about 3 to about 40 mg/kg, about 3.5 to about 40 mg/kg, about 4 to about 40 mg/kg, about 4.5 to about 40 mg/kg, about 5 to about 40 mg/kg, about 7.5 to about 40 mg/kg, about 10 to about 40 mg/kg, about 15 to about 40 mg/kg, about 20 to about 40 mg/kg, about 20 to about 40 mg/kg, about 25 to about 40 mg/kg, about 25 to about 40 mg/kg, about 30 to about 40 mg/kg, about 35 to about 40 mg/kg, about 0.5 to about 30 mg/kg, about 0.75 to about 30 mg/kg, about 1 to about 30 mg/mg, about 1.5 to about 30 mg/kb, about 2 to about 30 mg/kg, about 2.5 to about 30 mg/kg, about 3 to about 30 mg/kg, about 3.5 to about 30 mg/kg, about 4 to about 30 mg/kg, about 4.5 to about 30 mg/kg, about 5 to about 30 mg/kg, about 7.5 to about 30 mg/kg, about 10 to about 30 mg/kg, about 15 to about 30 mg/kg, about 20 to about 30 mg/kg, about 20 to about 30 mg/kg, about 25 to about 30 mg/kg, about 0.5 to about 20 mg/kg, about 0.75 to about 20 mg/kg, about 1 to about 20 mg/mg, about 1.5 to about 20 mg/kb, about 2 to about 20 mg/kg, about 2.5 to about 20 mg/kg, about 3 to about 20 mg/kg, about 3.5 to about 20 mg/kg, about 4 to about 20 mg/kg, about 4.5 to about 20 mg/kg, about 5 to about 20 mg/kg, about 7.5 to about 20 mg/kg, about 10 to about 20 mg/kg, or about 15 to about 20 mg/kg. In one embodiment, the dsRNA is administered at a dose of about 10 mg/kg to about 30 mg/kg. Values and ranges intermediate to the recited values are also intended to be part of this invention.

[0613] For example, subjects can be administered, e.g., subcutaneously or intravenously, a single therapeutic amount of iRNA, such as about 0.1, 0.125, 0.15, 0.175, 0.2, 0.225, 0.25, 0.275, 0.3, 0.325, 0.35, 0.375, 0.4, 0.425, 0.45, 0.475, 0.5, 0.525, 0.55, 0.575, 0.6, 0.625, 0.65, 0.675, 0.7, 0.725, 0.75, 0.775, 0.8, 0.825, 0.85, 0.875, 0.9, 0.925, 0.95, 0.975, 1, 1.1, 1.2, 1.3, 1.4, 1.5, 1.6, 1.7, 1.8, 1.9, 2, 2.1, 2.2, 2.3, 2.4, 2.5, 2.6, 2.7, 2.8, 2.9, 3, 3.1, 3.2, 3.3, 3.4, 3.5, 3.6, 3.7, 3.8, 3.9, 4, 4.1, 4.2, 4.3, 4.4, 4.5, 4.6, 4.7, 4.8, 4.9, 5, 5.1, 5.2, 5.3, 5.4, 5.5, 5.6, 5.7, 5.8, 5.9, 6, 6.1, 6.2, 6.3, 6.4, 6.5, 6.6, 6.7, 6.8, 6.9, 7, 7.1, 7.2, 7.3, 7.4, 7.5, 7.6, 7.7, 7.8, 7.9, 8, 8.1, 8.2, 8.3, 8.4, 8.5, 8.6, 8.7, 8.8, 8.9, 9, 9.1, 9.2, 9.3, 9.4, 9.5, 9.6, 9.7, 9.8, 9.9, 10, 10.5, 11, 11.5, 12, 12.5, 13, 13.5, 14, 14.5, 15, 15.5, 16, 16.5, 17, 17.5, 18, 18.5, 19, 19.5, 20, 20.5, 21, 21.5, 22, 22.5, 23, 23.5, 24, 24.5, 25, 25.5, 26, 26.5, 27, 27.5, 28, 28.5, 29, 29.5, 30, 31, 32, 33, 34, 34, 35, 36, 37, 38, 39, 40, 41, 42, 43, 44, 45, 46, 47, 48, 49, or about 50 mg/kg. Values and ranges intermediate to the recited values are also intended to be part of this invention.

[0614] In some embodiments, subjects are administered, e.g., subcutaneously or intravenously, multiple doses of a therapeutic amount of iRNA, such as a dose about 0.1, 0.125, 0.15, 0.175, 0.2, 0.225, 0.25, 0.275, 0.3, 0.325, 0.35, 0.375, 0.4, 0.425, 0.45, 0.475, 0.5, 0.525, 0.55, 0.575, 0.6, 0.625, 0.65, 0.675, 0.7, 0.725, 0.75, 0.775, 0.8, 0.825, 0.85, 0.875, 0.9, 0.925, 0.95, 0.975, 1, 1.1, 1.2, 1.3, 1.4, 1.5, 1.6, 1.7, 1.8, 1.9, 2, 2.1, 2.2, 2.3, 2.4, 2.5, 2.6, 2.7, 2.8, 2.9, 3, 3.1, 3.2, 3.3, 3.4, 3.5, 3.6, 3.7, 3.8, 3.9, 4, 4.1, 4.2, 4.3, 4.4, 4.5, 4.6, 4.7, 4.8, 4.9, 5, 5.1, 5.2, 5.3, 5.4, 5.5, 5.6, 5.7, 5.8, 5.9, 6, 6.1, 6.2, 6.3, 6.4, 6.5, 6.6, 6.7, 6.8, 6.9, 7, 7.1, 7.2, 7.3, 7.4, 7.5, 7.6, 7.7, 7.8, 7.9, 8, 8.1, 8.2, 8.3, 8.4, 8.5, 8.6, 8.7, 8.8, 8.9, 9, 9.1, 9.2, 9.3, 9.4, 9.5, 9.6, 9.7, 9.8, 9.9, 10, 10.5, 11, 11.5, 12, 12.5, 13, 13.5, 14, 14.5, 15, 15.5, 16, 16.5, 17, 17.5, 18, 18.5, 19, 19.5, 20, 20.5, 21, 21.5, 22, 22.5, 23, 23.5, 24, 24.5, 25, 25.5, 26, 26.5, 27, 27.5, 28, 28.5, 29, 29.5, 30, 31, 32, 33, 34, 34, 35, 36, 37, 38, 39, 40, 41, 42, 43, 44, 45, 46, 47, 48, 49, or about 50 mg/kg. A multi-dose regimine may include administration of a therapeutic amount of iRNA daily, such as for two days, three days, four days, five days, six days, seven days, or longer.

[0615] In other embodiments, subjects are administered, e.g., subcutaneously or intravenously, a repeat dose of a therapeutic amount of iRNA, such as a dose about 0.1, 0.125, 0.15, 0.175, 0.2, 0.225, 0.25, 0.275, 0.3, 0.325, 0.35, 0.375, 0.4, 0.425, 0.45, 0.475, 0.5, 0.525, 0.55, 0.575, 0.6, 0.625, 0.65, 0.675, 0.7, 0.725, 0.75, 0.775, 0.8, 0.825, 0.85, 0.875, 0.9, 0.925, 0.95, 0.975, 1, 1.1, 1.2, 1.3, 1.4, 1.5, 1.6, 1.7, 1.8, 1.9, 2, 2.1, 2.2, 2.3, 2.4, 2.5, 2.6, 2.7, 2.8, 2.9, 3, 3.1, 3.2, 3.3, 3.4, 3.5, 3.6, 3.7, 3.8, 3.9, 4, 4.1, 4.2, 4.3, 4.4, 4.5, 4.6, 4.7, 4.8, 4.9, 5, 5.1, 5.2, 5.3, 5.4, 5.5, 5.6, 5.7, 5.8, 5.9, 6, 6.1, 6.2, 6.3, 6.4, 6.5, 6.6, 6.7, 6.8, 6.9, 7, 7.1, 7.2, 7.3, 7.4, 7.5, 7.6, 7.7, 7.8, 7.9, 8, 8.1, 8.2, 8.3, 8.4, 8.5, 8.6, 8.7, 8.8, 8.9, 9, 9.1, 9.2, 9.3, 9.4, 9.5, 9.6, 9.7, 9.8, 9.9, 10, 10.5, 11, 11.5, 12, 12.5, 13, 13.5, 14, 14.5, 15, 15.5, 16, 16.5, 17, 17.5, 18, 18.5, 19, 19.5, 20, 20.5, 21, 21.5, 22, 22.5, 23, 23.5, 24, 24.5, 25, 25.5, 26, 26.5, 27, 27.5, 28, 28.5, 29, 29.5, 30, 31, 32, 33, 34, 34, 35, 36, 37, 38, 39, 40, 41, 42, 43, 44, 45, 46, 47, 48, 49, or about 50 mg/kg. A repeat-dose regimine may include administration of a therapeutic amount of iRNA on a regular basis, such as every other day, every third day, every fourth day, twice a week, once a week, every other week, or once a month.

[0616] The pharmaceutical composition can be administered by intravenous infusion over a period of time, such as over a 5, 6, 7, 8, 9, 10, 11, 12, 13, 14, 15, 16, 17, 18, 19, 20, and 21, 22, 23, 24, or about a 25 minute period. The administration may be repeated, for example, on a regular basis, such as weekly, biweekly (i.e., every two weeks) for one month, two months, three months, four months or longer. After an initial treatment regimen, the treatments can be administered on a less frequent basis. For example, after administration weekly or biweekly for three months, administration can be repeated once per month, for six months or a year or longer.

[0617] The pharmaceutical composition can be administered once daily, or the iRNA can be administered as two, three, or more sub-doses at appropriate intervals throughout the day or even using continuous infusion or delivery through a controlled release formulation. In that case, the iRNA contained in each sub-dose must be correspondingly smaller in order to achieve the total daily dosage. The dosage unit can also be compounded for delivery over several days, e.g., using a conventional sustained release formulation which provides sustained release of the iRNA over a several day period. Sustained release formulations are well known in the art and are particularly useful for delivery of agents at a particular site, such as could be used with the agents of the present invention. In this embodiment, the dosage unit contains a corresponding multiple of the daily dose.

[0618] In other embodiments, a single dose of the pharmaceutical compositions can be long lasting, such that subsequent doses are administered at not more than 3, 4, or 5 day intervals, or at not more than 1, 2, 3, or 4 week intervals. In some embodiments of the invention, a single dose of the pharmaceutical compositions of the invention is administered once per week. In other embodiments of the invention, a single dose of the pharmaceutical compositions of the invention is administered bi-monthly.

[0619] The skilled artisan will appreciate that certain factors can influence the dosage and timing required to effectively treat a subject, including but not limited to the severity of the disease or disorder, previous treatments, the general health and/or age of the subject, and other diseases present. Moreover, treatment of a subject with a therapeutically effective amount of a composition can include a single treatment or a series of treatments. Estimates of effective dosages and in vivo half-lives for the individual iRNAs encompassed by the invention can be made using conventional methodologies or on the basis of in vivo testing using an appropriate animal model, as described elsewhere herein.

[0620] Advances in mouse genetics have generated a number of mouse models for the study of various human diseases, such as a disorder that would benefit from reduction in the expression of CFB, C3, or C9. Such models can be used for in vivo testing of iRNA, as well as for determining a therapeutically effective dose. Suitable mouse models are known in the art and include, for example, collagen-induced arthritis mouse model (Courtenay, J. S., et al. (1980) Nature 283, 666-668), myocardial ischemia (Homeister J W and Lucchesi B R (1994) Annu Rev Pharmacol Toxicol 34:17-40), ovalbumin induced asthma mouse models (e.g., Tomkinson A., et al. (2001). J. Immunol. 166, 5792-5800), (NZB×NZW) F1, MRL/Fas^{lpr} (MRL/lpr) and BXSB mouse models (Theofilopoulos, A. N. and Kono, D. H. 1999. Murine lupus models: gene-specific and genome-wide studies. In Lahita R. G., ed., Systemic Lupus Erythematosus, 3rd edn, p. 145. Academic Press, San Diego, CA), mouse aHUS model (Goicoechea de Jorge et al. (2011) The development of atypical hemolytic uremic syndrome depeds on complement C5, J Am Soc Nephrol 22:137-145.

[0621] The pharmaceutical compositions of the present invention can be administered in a number of ways depending upon whether local or systemic treatment is desired and upon the area to be treated. Administration can be topical (e.g., by a transdermal patch), pulmonary, e.g., by inhalation or insufflation of powders or aerosols, including by nebulizer; intratracheal, intranasal, epidermal and transdermal, oral or parenteral. Parenteral administration includes intravenous, intraarterial, subcutaneous, intraperitoneal or intramuscular injection or infusion; subdermal, e.g., via an implanted device; or intracranial, e.g., by intraparenchymal, intrathecal or intraventricular, administration.

[0622] The iRNA can be delivered in a manner to target a particular tissue, such as the liver (e.g., the hepatocytes of the liver).

[0623] Pharmaceutical compositions and formulations for topical administration can include transdermal patches, ointments, lotions, creams, gels, drops, suppositories, sprays, liquids and powders. Conventional pharmaceutical carriers, aqueous, powder or oily bases, thickeners and the like can be necessary or desirable. Coated condoms, gloves and the like can also be useful. Suitable topical formulations include those in which the iRNAs featured in the invention are in admixture with a topical delivery agent such as lipids, liposomes, fatty acids, fatty acid esters, steroids, chelating agents and surfactants. Suitable lipids and liposomes include neutral (e.g., dioleoylphosphatidyl DOPE ethanolamine, dimyristoylphosphatidyl choline DMPC, distearolyphosphatidyl choline) negative (e.g., dimyristoylphosphatidyl glycerol DMPG) and cationic (e.g., dioleoyltetramethylaminopropyl DOTAP and dioleoylphosphatidyl ethanolamine DOTMA). iRNAs featured in the invention can be encapsulated within liposomes or can form complexes thereto, in particular to cationic liposomes. Alternatively, iRNAs can be complexed to lipids, in particular to cationic lipids. Suitable fatty acids and esters include but are not limited to arachidonic acid, oleic acid, eicosanoic acid, lauric acid, caprylic acid, capric acid, myristic acid, palmitic acid, stearic acid, linoleic acid, linolenic acid, dicaprate, tricaprate, monoolein, dilaurin, glyceryl 1-monocaprate, 1-dodecylazacycloheptan-2-one, an acylcarnitine, an acylcholine, or a C1-20 alkyl ester (e.g., isopropylmyristate IPM), monoglyceride, diglyceride or pharmaceutically acceptable salt thereof). Topical formulations are described in detail in U.S. Pat. No. 6,747,014, which is incorporated herein by reference.

A. iRNA Formulations Comprising Membranous Molecular Assemblies

[0624] An iRNA for use in the compositions and methods of the invention can be formulated for delivery in a membranous molecular assembly, e.g., a liposome or a micelle. As used herein, the term “liposome” refers to a vesicle composed of amphiphilic lipids arranged in at least one bilayer, e.g., one bilayer or a plurality of bilayers. Liposomes include unilamellar and multilamellar vesicles that have a membrane formed from a lipophilic material and an aqueous interior. The aqueous portion contains the iRNA composition. The lipophilic material isolates the aqueous interior from an aqueous exterior, which typically does not include the iRNA composition, although in some examples, it may. Liposomes are useful for the transfer and delivery of active ingredients to the site of action. Because the liposomal membrane is structurally similar to biological membranes, when liposomes are applied to a tissue, the liposomal bilayer fuses with bilayer of the cellular membranes. As the merging of the liposome and cell progresses, the internal aqueous contents that include the iRNA are delivered into the cell where the iRNA can specifically bind to a target RNA and can mediate RNAi. In some cases the liposomes are also specifically targeted, e.g., to direct the iRNA to particular cell types.

[0625] A liposome containing a RNAi agent can be prepared by a variety of methods. In one example, the lipid component of a liposome is dissolved in a detergent so that micelles are formed with the lipid component. For example, the lipid component can be an amphipathic cationic lipid or lipid conjugate. The detergent can have a high critical micelle concentration and may be nonionic. Exemplary detergents include cholate, CHAPS, octylglucoside, deoxycholate, and lauroyl sarcosine. The RNAi agent preparation is then added to the micelles that include the lipid component. The cationic groups on the lipid interact with the RNAi agent and condense around the RNAi agent to form a liposome. After condensation, the detergent is removed, e.g., by dialysis, to yield a liposomal preparation of RNAi agent.

[0626] If necessary a carrier compound that assists in condensation can be added during the condensation reaction, e.g., by controlled addition. For example, the carrier compound can be a polymer other than a nucleic acid (e.g., spermine or spermidine). pH can also adjusted to favor condensation.

[0627] Methods for producing stable polynucleotide delivery vehicles, which incorporate a polynucleotide/cationic lipid complex as structural components of the delivery vehicle, are further described in, e.g., WO 96/37194, the entire contents of which are incorporated herein by reference. Liposome formation can also include one or more aspects of exemplary methods described in Felgner, P. L. et al., Proc. Natl. Acad. Sci., USA 8:7413-7417, 1987; U.S. Pat. Nos. 4,897,355; 5,171,678; Bangham, et al. M. Mol. Biol. 23:238, 1965; Olson, et al. Biochim. Biophys. Acta 557:9, 1979; Szoka, et al. Proc. Natl. Acad. Sci. 75:4194, 1978; Mayhew, et al. Biochim. Biophys. Acta 775:169, 1984; Kim, et al. Biochim. Biophys. Acta 728:339, 1983; and Fukunaga, et al. Endocrinol. 115:757, 1984. Commonly used techniques for preparing lipid aggregates of appropriate size for use as delivery vehicles include sonication and freeze-thaw plus extrusion (see, e.g., Mayer, et al. Biochim. Biophys. Acta 858:161, 1986). Microfluidization can be used when consistently small (50 to 200 nm) and relatively uniform aggregates are desired (Mayhew, et al. Biochim. Biophys. Acta 775:169, 1984). These methods are readily adapted to packaging RNAi agent preparations into liposomes.

[0628] Liposomes fall into two broad classes. Cationic liposomes are positively charged liposomes which interact with the negatively charged nucleic acid molecules to form a stable complex. The positively charged nucleic acid/liposome complex binds to the negatively charged cell surface and is internalized in an endosome. Due to the acidic pH within the endosome, the liposomes are ruptured, releasing their contents into the cell cytoplasm (Wang et al., Biochem. Biophys. Res. Commun., 1987, 147, 980-985).

[0629] Liposomes which are pH-sensitive or negatively-charged, entrap nucleic acids rather than complex with it. Since both the nucleic acid and the lipid are similarly charged, repulsion rather than complex formation occurs. Nevertheless, some nucleic acid is entrapped within the aqueous interior of these liposomes. pH-sensitive liposomes have been used to deliver nucleic acids encoding the thymidine kinase gene to cell monolayers in culture. Expression of the exogenous gene was detected in the target cells (Zhou et al., Journal of Controlled Release, 1992, 19, 269-274).

[0630] One major type of liposomal composition includes phospholipids other than naturally-derived phosphatidylcholine. Neutral liposome compositions, for example, can be formed from dimyristoyl phosphatidylcholine (DMPC) or dipalmitoyl phosphatidylcholine (DPPC). Anionic liposome compositions generally are formed from dimyristoyl phosphatidylglycerol, while anionic fusogenic liposomes are formed primarily from dioleoyl phosphatidylethanolamine (DOPE). Another type of liposomal composition is formed from phosphatidylcholine (PC) such as, for example, soybean PC, and egg PC. Another type is formed from mixtures of phospholipid and/or phosphatidylcholine and/or cholesterol.

[0631] Examples of other methods to introduce liposomes into cells in vitro and in vivo include U.S. Pat. Nos. 5,283,185; 5,171,678; WO 94/00569; WO 93/24640; WO 91/16024; Felgner, J. Biol. Chem. 269:2550, 1994; Nabel, Proc. Natl. Acad. Sci. 90:11307, 1993; Nabel, Human Gene Ther. 3:649, 1992; Gershon, Biochem. 32:7143, 1993; and Strauss EMBO J. 11:417, 1992.

[0632] Non-ionic liposomal systems have also been examined to determine their utility in the delivery of drugs to the skin, in particular systems comprising non-ionic surfactant and cholesterol. Non-ionic liposomal formulations comprising Novasome™ I (glyceryl dilaurate/cholesterol/polyoxyethylene-10-stearyl ether) and Novasome™ II (glyceryl distearate/cholesterol/polyoxyethylene-10-stearyl ether) were used to deliver cyclosporin-A into the dermis of mouse skin. Results indicated that such non-ionic liposomal systems were effective in facilitating the deposition of cyclosporine A into different layers of the skin (Hu et al. S. T. P. Pharma. Sci., 1994, 4 (6) 466).

[0633] Liposomes also include “sterically stabilized” liposomes, a term which, as used herein, refers to liposomes comprising one or more specialized lipids that, when incorporated into liposomes, result in enhanced circulation lifetimes relative to liposomes lacking such specialized lipids. Examples of sterically stabilized liposomes are those in which part of the vesicle-forming lipid portion of the liposome (A) comprises one or more glycolipids, such as monosialoganglioside GM, or (B) is derivatized with one or more hydrophilic polymers, such as a polyethylene glycol (PEG) moiety. While not wishing to be bound by any particular theory, it is thought in the art that, at least for sterically stabilized liposomes containing gangliosides, sphingomyelin, or PEG-derivatized lipids, the enhanced circulation half-life of these sterically stabilized liposomes derives from a reduced uptake into cells of the reticuloendothelial system (RES) (Allen et al., FEBS Letters, 1987, 223, 42; Wu et al., Cancer Research, 1993, 53, 3765).

[0634] Various liposomes comprising one or more glycolipids are known in the art. Papahadjopoulos et al. (Ann. N.Y. Acad. Sci., 1987, 507, 64) reported the ability of monosialoganglioside GM1, galactocerebroside sulfate and phosphatidylinositol to improve blood half-lives of liposomes. These findings were expounded upon by Gabizon et al. (Proc. Natl. Acad. Sci. U.S.A., 1988, 85, 6949). U.S. Pat. No. 4,837,028 and WO 88/04924, both to Allen et al., disclose liposomes comprising (1) sphingomyelin and (2) the ganglioside Gui or a galactocerebroside sulfate ester. U.S. Pat. No. 5,543,152 (Webb et al.) discloses liposomes comprising sphingomyelin. Liposomes comprising 1,2-sn-dimyristoylphosphatidylcholine are disclosed in WO 97/13499 (Lim et al).

[0635] In one embodiment, cationic liposomes are used. Cationic liposomes possess the advantage of being able to fuse to the cell membrane. Non-cationic liposomes, although not able to fuse as efficiently with the plasma membrane, are taken up by macrophages in vivo and can be used to deliver RNAi agents to macrophages.

[0636] Further advantages of liposomes include: liposomes obtained from natural phospholipids are biocompatible and biodegradable; liposomes can incorporate a wide range of water and lipid soluble drugs; liposomes can protect encapsulated RNAi agents in their internal compartments from metabolism and degradation (Rosoff, in “Pharmaceutical Dosage Forms,” Lieberman, Rieger and Banker (Eds.), 1988, volume 1, p. 245). Important considerations in the preparation of liposome formulations are the lipid surface charge, vesicle size and the aqueous volume of the liposomes.

[0637] A positively charged synthetic cationic lipid, N-[1-(2,3-dioleyloxy) propyl]-N,N,N-trimethylammonium chloride (DOTMA) can be used to form small liposomes that interact spontaneously with nucleic acid to form lipid-nucleic acid complexes which are capable of fusing with the negatively charged lipids of the cell membranes of tissue culture cells, resulting in delivery of RNAi agent (see, e.g., Felgner, P. L. et al., Proc. Natl. Acad. Sci., USA 8:7413-7417, 1987 and U.S. Pat. No. 4,897,355 for a description of DOTMA and its use with DNA).

[0638] A DOTMA analogue, 1,2-bis(oleoyloxy)-3-(trimethylammonia) propane (DOTAP) can be used in combination with a phospholipid to form DNA-complexing vesicles. Lipofectin™ Bethesda Research Laboratories, Gaithersburg, Md.) is an effective agent for the delivery of highly anionic nucleic acids into living tissue culture cells that comprise positively charged DOTMA liposomes which interact spontaneously with negatively charged polynucleotides to form complexes. When enough positively charged liposomes are used, the net charge on the resulting complexes is also positive. Positively charged complexes prepared in this way spontaneously attach to negatively charged cell surfaces, fuse with the plasma membrane, and efficiently deliver functional nucleic acids into, for example, tissue culture cells. Another commercially available cationic lipid, 1,2-bis(oleoyloxy)-3,3-(trimethylammonia) propane (“DOTAP”) (Boehringer Mannheim, Indianapolis, Indiana) differs from DOTMA in that the oleoyl moieties are linked by ester, rather than ether linkages.

[0639] Other reported cationic lipid compounds include those that have been conjugated to a variety of moieties including, for example, carboxyspermine which has been conjugated to one of two types of lipids and includes compounds such as 5-carboxyspermylglycine dioctaoleoylamide (“DOGS”) (Transfectam™, Promega, Madison, Wisconsin) and dipalmitoylphosphatidylethanolamine 5-carboxyspermyl-amide (“DPPES”) (see, e.g., U.S. Pat. No. 5,171,678).

[0640] Another cationic lipid conjugate includes derivatization of the lipid with cholesterol (“DC-Chol”) which has been formulated into liposomes in combination with DOPE (See, Gao, X. and Huang, L., Biochim. Biophys. Res. Commun. 179:280, 1991). Lipopolylysine, made by conjugating polylysine to DOPE, has been reported to be effective for transfection in the presence of serum (Zhou, X. et al., Biochim. Biophys. Acta 1065:8, 1991). For certain cell lines, these liposomes containing conjugated cationic lipids, are said to exhibit lower toxicity and provide more efficient transfection than the DOTMA-containing compositions. Other commercially available cationic lipid products include DMRIE and DMRIE-HP (Vical, La Jolla, California) and Lipofectamine (DOSPA) (Life Technology, Inc., Gaithersburg, Maryland). Other cationic lipids suitable for the delivery of oligonucleotides are described in WO 98/39359 and WO 96/37194.

[0641] Liposomal formulations are particularly suited for topical administration, liposomes present several advantages over other formulations. Such advantages include reduced side effects related to high systemic absorption of the administered drug, increased accumulation of the administered drug at the desired target, and the ability to administer RNAi agent into the skin. In some implementations, liposomes are used for delivering RNAi agent to epidermal cells and also to enhance the penetration of RNAi agent into dermal tissues, e.g., into skin. For example, the liposomes can be applied topically. Topical delivery of drugs formulated as liposomes to the skin has been documented (see, e.g., Weiner et al., Journal of Drug Targeting, 1992, vol. 2,405-410 and du Plessis et al., Antiviral Research, 18, 1992, 259-265; Mannino, R. J. and Fould-Fogerite, S., Biotechniques 6:682-690, 1988; Itani, T. et al. Gene 56:267-276. 1987; Nicolau, C. et al. Meth. Enz. 149:157-176, 1987; Straubinger, R. M. and Papahadjopoulos, D. Meth. Enz. 101:512-527, 1983; Wang, C. Y. and Huang, L., Proc. Natl. Acad. Sci. USA 84:7851-7855, 1987).

[0642] Non-ionic liposomal systems have also been examined to determine their utility in the delivery of drugs to the skin, in particular systems comprising non-ionic surfactant and cholesterol. Non-ionic liposomal formulations comprising Novasome I (glyceryl dilaurate/cholesterol/polyoxyethylene-10-stearyl ether) and Novasome II (glyceryl distearate/cholesterol/polyoxyethylene-10-stearyl ether) were used to deliver a drug into the dermis of mouse skin. Such formulations with RNAi agent are useful for treating a dermatological disorder.

[0643] Liposomes that include iRNA can be made highly deformable. Such deformability can enable the liposomes to penetrate through pore that are smaller than the average radius of the liposome. For example, transfersomes are a type of deformable liposomes. Transferosomes can be made by adding surface edge activators, usually surfactants, to a standard liposomal composition. Transfersomes that include RNAi agent can be delivered, for example, subcutaneously by infection in order to deliver RNAi agent to keratinocytes in the skin. In order to cross intact mammalian skin, lipid vesicles must pass through a series of fine pores, each with a diameter less than 50 nm, under the influence of a suitable transdermal gradient. In addition, due to the lipid properties, these transferosomes can be self-optimizing (adaptive to the shape of pores, e.g., in the skin), self-repairing, and can frequently reach their targets without fragmenting, and often self-loading.

[0644] Other formulations amenable to the present invention are described in U.S. provisional application Ser. No. 61/018,616, filed Jan. 2, 2008; 61/018,611, filed Jan. 2, 2008; 61/039,748, filed Mar. 26, 2008; 61/047,087, filed Apr. 22, 2008 and 61/051,528, filed May 8, 2008. PCT application no PCT/US2007/080331, filed Oct. 3, 2007 also describes formulations that are amenable to the present invention.

[0645] Transfersomes are yet another type of liposomes, and are highly deformable lipid aggregates which are attractive candidates for drug delivery vehicles. Transfersomes can be described as lipid droplets which are so highly deformable that they are easily able to penetrate through pores which are smaller than the droplet. Transfersomes are adaptable to the environment in which they are used, e.g., they are self-optimizing (adaptive to the shape of pores in the skin), self-repairing, frequently reach their targets without fragmenting, and often self-loading. To make transfersomes it is possible to add surface edge-activators, usually surfactants, to a standard liposomal composition. Transfersomes have been used to deliver serum albumin to the skin. The transfersome-mediated delivery of serum albumin has been shown to be as effective as subcutaneous injection of a solution containing serum albumin.

[0646] Surfactants find wide application in formulations such as emulsions (including microemulsions) and liposomes. The most common way of classifying and ranking the properties of the many different types of surfactants, both natural and synthetic, is by the use of the hydrophile/lipophile balance (HLB). The nature of the hydrophilic group (also known as the “head”) provides the most useful means for categorizing the different surfactants used in formulations (Rieger, in “Pharmaceutical Dosage Forms”, Marcel Dekker, Inc., New York, N.Y., 1988, p. 285).

[0647] If the surfactant molecule is not ionized, it is classified as a nonionic surfactant. Nonionic surfactants find wide application in pharmaceutical and cosmetic products and are usable over a wide range of pH values. In general their HLB values range from 2 to about 18 depending on their structure. Nonionic surfactants include nonionic esters such as ethylene glycol esters, propylene glycol esters, glyceryl esters, polyglyceryl esters, sorbitan esters, sucrose esters, and ethoxylated esters. Nonionic alkanolamides and ethers such as fatty alcohol ethoxylates, propoxylated alcohols, and ethoxylated/propoxylated block polymers are also included in this class. The polyoxyethylene surfactants are the most popular members of the nonionic surfactant class.

[0648] If the surfactant molecule carries a negative charge when it is dissolved or dispersed in water, the surfactant is classified as anionic. Anionic surfactants include carboxylates such as soaps, acyl lactylates, acyl amides of amino acids, esters of sulfuric acid such as alkyl sulfates and ethoxylated alkyl sulfates, sulfonates such as alkyl benzene sulfonates, acyl isethionates, acyl taurates and sulfosuccinates, and phosphates. The most important members of the anionic surfactant class are the alkyl sulfates and the soaps.

[0649] If the surfactant molecule carries a positive charge when it is dissolved or dispersed in water, the surfactant is classified as cationic. Cationic surfactants include quaternary ammonium salts and ethoxylated amines. The quaternary ammonium salts are the most used members of this class.

[0650] If the surfactant molecule has the ability to carry either a positive or negative charge, the surfactant is classified as amphoteric. Amphoteric surfactants include acrylic acid derivatives, substituted alkylamides, N-alkylbetaines and phosphatides.

[0651] The use of surfactants in drug products, formulations and in emulsions has been reviewed (Rieger, in “Pharmaceutical Dosage Forms”, Marcel Dekker, Inc., New York, N.Y., 1988, p. 285).

[0652] The iRNA for use in the methods of the invention can also be provided as micellar formulations. “Micelles” are defined herein as a particular type of molecular assembly in which amphipathic molecules are arranged in a spherical structure such that all the hydrophobic portions of the molecules are directed inward, leaving the hydrophilic portions in contact with the surrounding aqueous phase. The converse arrangement exists if the environment is hydrophobic.

[0653] A mixed micellar formulation suitable for delivery through transdermal membranes may be prepared by mixing an aqueous solution of the siRNA composition, an alkali metal C₈ to C₂₂ alkyl sulphate, and a micelle forming compounds. Exemplary micelle forming compounds include lecithin, hyaluronic acid, pharmaceutically acceptable salts of hyaluronic acid, glycolic acid, lactic acid, chamomile extract, cucumber extract, oleic acid, linoleic acid, linolenic acid, monoolein, monooleates, monolaurates, borage oil, evening of primrose oil, menthol, trihydroxy oxo cholanyl glycine and pharmaceutically acceptable salts thereof, glycerin, polyglycerin, lysine, polylysine, triolein, polyoxyethylene ethers and analogues thereof, polidocanol alkyl ethers and analogues thereof, chenodeoxycholate, deoxycholate, and mixtures thereof. The micelle forming compounds may be added at the same time or after addition of the alkali metal alkyl sulphate. Mixed micelles will form with substantially any kind of mixing of the ingredients but vigorous mixing in order to provide smaller size micelles.

[0654] In one method a first micellar composition is prepared which contains the siRNA composition and at least the alkali metal alkyl sulphate. The first micellar composition is then mixed with at least three micelle forming compounds to form a mixed micellar composition. In another method, the micellar composition is prepared by mixing the siRNA composition, the alkali metal alkyl sulphate and at least one of the micelle forming compounds, followed by addition of the remaining micelle forming compounds, with vigorous mixing.

[0655] Phenol and/or m-cresol may be added to the mixed micellar composition to stabilize the formulation and protect against bacterial growth. Alternatively, phenol and/or m-cresol may be added with the micelle forming ingredients. An isotonic agent such as glycerin may also be added after formation of the mixed micellar composition.

[0656] For delivery of the micellar formulation as a spray, the formulation can be put into an aerosol dispenser and the dispenser is charged with a propellant. The propellant, which is under pressure, is in liquid form in the dispenser. The ratios of the ingredients are adjusted so that the aqueous and propellant phases become one, i.e., there is one phase. If there are two phases, it is necessary to shake the dispenser prior to dispensing a portion of the contents, e.g., through a metered valve. The dispensed dose of pharmaceutical agent is propelled from the metered valve in a fine spray.

[0657] Propellants may include hydrogen-containing chlorofluorocarbons, hydrogen-containing fluorocarbons, dimethyl ether and diethyl ether. In certain embodiments, HFA 134a (1,1,1,2 tetrafluoroethane) may be used.

[0658] The specific concentrations of the essential ingredients can be determined by relatively straightforward experimentation. For absorption through the oral cavities, it is often desirable to increase, e.g., at least double or triple, the dosage for through injection or administration through the gastrointestinal tract.

### B. Lipid Particles

[0659] iRNAs, e.g., dsRNAs of in the invention may be fully encapsulated in a lipid formulation, e.g., a LNP, or other nucleic acid-lipid particle.

[0660] As used herein, the term “LNP” refers to a stable nucleic acid-lipid particle. LNPs typically contain a cationic lipid, a non-cationic lipid, and a lipid that prevents aggregation of the particle (e.g., a PEG-lipid conjugate). LNPs are extremely useful for systemic applications, as they exhibit extended circulation lifetimes following intravenous (i.v.) injection and accumulate at distal sites (e.g., sites physically separated from the administration site). LNPs include “pSPLP,” which include an encapsulated condensing agent-nucleic acid complex as set forth in PCT Publication No. WO 00/03683. The particles of the present invention typically have a mean diameter of about 50 nm to about 150 nm, more typically about 60 nm to about 130 nm, more typically about 70 nm to about 110 nm, most typically about 70 nm to about 90 nm, and are substantially nontoxic. In addition, the nucleic acids when present in the nucleic acid-lipid particles of the present invention are resistant in aqueous solution to degradation with a nuclease. Nucleic acid-lipid particles and their method of preparation are disclosed in, e.g., U.S. Pat. Nos. 5,976,567; 5,981,501; 6,534,484; 6,586,410; 6,815,432; U.S. Publication No. 2010/0324120 and PCT Publication No. WO 96/40964.

[0661] In one embodiment, the lipid to drug ratio (mass/mass ratio) (e.g., lipid to dsRNA ratio) will be in the range of from about 1:1 to about 50:1, from about 1:1 to about 25:1, from about 3:1 to about 15:1, from about 4:1 to about 10:1, from about 5:1 to about 9:1, or about 6:1 to about 9:1. Ranges intermediate to the above recited ranges are also contemplated to be part of the invention.

[0662] The cationic lipid can be, for example, N,N-dioleyl-N,N-dimethylammonium chloride (DODAC), N,N-distearyl-N,N-dimethylammonium bromide (DDAB), N-(I-(2,3-dioleoyloxy) propyl)-N,N,N-trimethylammonium chloride (DOTAP), N-(I-(2,3-dioleyloxy) propyl)-N,N,N-trimethylammonium chloride (DOTMA), N,N-dimethyl-2,3-dioleyloxy) propylamine (DODMA), 1,2-DiLinoleyloxy-N,N-dimethylaminopropane (DLinDMA), 1,2-Dilinolenyloxy-N,N-dimethylaminopropane (DLenDMA), 1,2-Dilinoleylcarbamoyloxy-3-dimethylaminopropane (DLin-C-DAP), 1,2-Dilinoleyoxy-3-(dimethylamino) acetoxypropane (DLin-DAC), 1,2-Dilinoleyoxy-3-morpholinopropane (DLin-MA), 1,2-Dilinoleoyl-3-dimethylaminopropane (DLinDAP), 1,2-Dilinoleylthio-3-dimethylaminopropane (DLin-S-DMA), 1-Linoleoyl-2-linoleyloxy-3-dimethylaminopropane (DLin-2-DMAP), 1,2-Dilinoleyloxy-3-trimethylaminopropane chloride salt (DLin-TMA·Cl), 1,2-Dilinoleoyl-3-trimethylaminopropane chloride salt (DLin-TAP·Cl), 1,2-Dilinoleyloxy-3-(N-methylpiperazino) propane (DLin-MPZ), or 3-(N,N-Dilinoleylamino)-1,2-propanediol (DLinAP), 3-(N,N-Dioleylamino)-1,2-propanedio (DOAP), 1,2-Dilinoleyloxo-3-(2-N,N-dimethylamino) ethoxypropane (DLin-EG-DMA), 1,2-Dilinolenyloxy-N,N-dimethylaminopropane (DLinDMA), 2,2-Dilinoleyl-4-dimethylaminomethyl-[1,3]-dioxolane (DLin-K-DMA) or analogs thereof, (3aR,5s,6aS)-N,N-dimethyl-2,2-di((9Z,12Z)-octadeca-9,12-dienyl)tetrahydro-3aH-cyclopenta [d][1,3]dioxol-5-amine (ALN100), (6Z,9Z,28Z,31Z)-heptatriaconta-6,9,28,31-tetraen-19-yl 4-(dimethylamino) butanoate (MC3), 1, 1′-(2-(4-(2-((2-(bis(2-hydroxydodecyl)amino)ethyl) (2-hydroxydodecyl)amino)ethyl) piperazin-1-yl)ethylazanediyl)didodecan-2-ol (Tech G1), or a mixture thereof. The cationic lipid can comprise from about 20 mol % to about 50 mol % or about 40 mol % of the total lipid present in the particle.

[0663] In another embodiment, the compound 2,2-Dilinoleyl-4-dimethylaminoethyl-[1,3]-dioxolane can be used to prepare lipid-siRNA nanoparticles. Synthesis of 2,2-Dilinoleyl-4-dimethylaminoethyl-[1,3]-dioxolane is described in U.S. provisional patent application No. 61/107,998 filed on Oct. 23, 2008, which is herein incorporated by reference.

[0664] In one embodiment, the lipid-siRNA particle includes 40% 2, 2-Dilinoleyl-4-dimethylaminoethyl-[1,3]-dioxolane: 10% DSPC: 40% Cholesterol: 10% PEG-C-DOMG (mole percent) with a particle size of 63.0±20 nm and a 0.027 siRNA/Lipid Ratio.

[0665] The ionizable/non-cationic lipid can be an anionic lipid or a neutral lipid including, but not limited to, distearoylphosphatidylcholine (DSPC), dioleoylphosphatidylcholine (DOPC), dipalmitoylphosphatidylcholine (DPPC), dioleoylphosphatidylglycerol (DOPG), dipalmitoylphosphatidylglycerol (DPPG), dioleoyl-phosphatidylethanolamine (DOPE), palmitoyloleoylphosphatidylcholine (POPC), palmitoyloleoylphosphatidylethanolamine (POPE), dioleoyl-phosphatidylethanolamine 4-(N-maleimidomethyl)-cyclohexane-1-carboxylate (DOPE-mal), dipalmitoyl phosphatidyl ethanolamine (DPPE), dimyristoylphosphoethanolamine (DMPE), distearoyl-phosphatidyl-ethanolamine (DSPE), 16-O-monomethyl PE, 16-O-dimethyl PE, 18-1-trans PE, 1-stearoyl-2-oleoyl-phosphatidyethanolamine (SOPE), cholesterol, or a mixture thereof. The non-cationic lipid can be from about 5 mol % to about 90 mol %, about 10 mol %, or about 58 mol % if cholesterol is included, of the total lipid present in the particle.

[0666] The conjugated lipid that inhibits aggregation of particles can be, for example, a polyethyleneglycol (PEG)-lipid including, without limitation, a PEG-diacylglycerol (DAG), a PEG-dialkyloxypropyl (DAA), a PEG-phospholipid, a PEG-ceramide (Cer), or a mixture thereof. The PEG-DAA conjugate can be, for example, a PEG-dilauryloxypropyl (Ci₂), a PEG-dimyristyloxypropyl (Ci₄), a PEG-dipalmityloxypropyl (Ci₆), or a PEG-distearyloxypropyl (C]₈). The conjugated lipid that prevents aggregation of particles can be from 0 mol % to about 20 mol % or about 2 mol % of the total lipid present in the particle.

[0667] In some embodiments, the nucleic acid-lipid particle further includes cholesterol at, e.g., about 10 mol % to about 60 mol % or about 48 mol % of the total lipid present in the particle.

[0668] In one embodiment, the lipidoid ND98·4HCl (MW 1487) (see U.S. patent application Ser. No. 12/056,230, filed Mar. 26, 2008, which is incorporated herein by reference), Cholesterol (Sigma-Aldrich), and PEG-Ceramide C16 (Avanti Polar Lipids) can be used to prepare lipid-dsRNA nanoparticles (i.e., LNP01 particles). Stock solutions of each in ethanol can be prepared as follows: ND98, 133 mg/ml; Cholesterol, 25 mg/ml, PEG-Ceramide C16, 100 mg/ml. The ND98, Cholesterol, and PEG-Ceramide C16 stock solutions can then be combined in a, e.g., 42:48:10 molar ratio. The combined lipid solution can be mixed with aqueous dsRNA (e.g., in sodium acetate pH 5) such that the final ethanol concentration is about 35-45% and the final sodium acetate concentration is about 100-300 mM. Lipid-dsRNA nanoparticles typically form spontaneously upon mixing. Depending on the desired particle size distribution, the resultant nanoparticle mixture can be extruded through a polycarbonate membrane (e.g., 100 nm cut-off) using, for example, a thermobarrel extruder, such as Lipex Extruder (Northern Lipids, Inc). In some cases, the extrusion step can be omitted. Ethanol removal and simultaneous buffer exchange can be accomplished by, for example, dialysis or tangential flow filtration. Buffer can be exchanged with, for example, phosphate buffered saline (PBS) at about pH 7, e.g., about pH 6.9, about pH 7.0, about pH 7.1, about pH 7.2, about pH 7.3, or about pH 7.4.

[chemical structure]

[0669] LNP01 formulations are described, e.g., in International Application Publication No. WO 2008/042973, which is hereby incorporated by reference.

[0670] Additional exemplary lipid-dsRNA formulations are described in Table 1.

TABLE 1

| | | cationic lipid/ |
|---|---|---|
| | | non-cationic |
| | | lipid/cholesterol/ |
| | Ionizable/ | PEG-lipid conjugate |
| | Cationic Lipid | Lipids:siRNA ratio |
| SNAL-1 | 1,2-Dilinolenyloxy- | DLinDMA/DPPC/Cholesterol/ |
| | N,N-dimethylaminopropane | PEG-cDMA (57.1/7.1/34.4/1.4) |
| | (DLinDMA) | lipid:siRNA ~7:1 |
| 2-XTC | 2,2-Dilinoleyl-4-dimethylamino- | XTC/DPPC/Cholesterol/PEG- |
| | ethyl-[1,3]-dioxolane (XTC) | cDMA 57.1/7.1/34.4/1.4 |
| | | lipid:siRNA ~7:1 |
| LNP05 | 2,2-Dilinoleyl-4-dimethylamino- | XTC/DSPC/Cholesterol/PEG- |
| | ethyl-[1,3]-dioxolane (XTC) | DMG 57.5/7.5/31.5/3.5 |
| | | lipid:siRNA ~6:1 |
| LNP06 | 2,2-Dilinoleyl-4-dimethylamino- | XTC/DSPC/Cholesterol/PEG- |
| | ethyl-[1,3]-dioxolane (XTC) | DMG 57.5/7.5/31.5/3.5 |
| | | lipid:siRNA ~11:1 |
| LNP07 | 2,2-Dilinoleyl-4-dimethylamino- | XTC/DSPC/Cholesterol/PEG- |
| | ethyl-[1,3]-dioxolane (XTC) | DMG 60/7.5/31/1.5, |
| | | lipid:siRNA ~6:1 |
| LNP08 | 2,2-Dilinoleyl-4-dimethylamino- | XTC/DSPC/Cholesterol/PEG- |
| | ethyl-[1,3]-dioxolane (XTC) | DMG 60/7.5/31/1.5, |
| | | lipid:siRNA ~11:1 |
| LNP09 | 2,2-Dilinoleyl-4-dimethylamino- | XTC/DSPC/Cholesterol/PEG- |
| | ethyl-[1,3]-dioxolane (XTC) | DMG 50/10/38.5/1.5 |
| | | Lipid:siRNA 10:1 |
| LNP10 | (3aR,5s,6aS)-N,N-dimethyl- | ALN100/DSPC/Cholesterol/ |
| | 2,2-di((9Z,12Z)-octadeca-9,12- | PEG-DMG 50/10/38.5/1.5 |
| | dienyl)tetrahydro-3aH- | Lipid:siRNA 10:1 |
| | cyclopenta[d][1,3]dioxol-5-amine | |
| | (ALN100) | |
| LNP11 | (6Z,9Z,28Z,31Z)-heptatriaconta- | MC-3/DSPC/Cholesterol/ |
| | 6,9,28,31-tetraen-19-yl | PEG-DMG 50/10/38.5/1.5 |
| | 4-(dimethylamino)buranoate | Lipid:siRNA 10:1 |
| | (MC3) | |
| LNP12 | 1,1′-(2-(4-(2-((2-(bis(2- | Tech G1/DSPC/Cholesterol/ |
| | hydroxydodecyl)amino)ethyl) | PEG-DMG 50/10/38.5/1.5 |
| | (2-hydroxydodecyl)amino)ethyl) | Lipid:siRNA 10:1 |
| | piperazin-1-yl)ethylazanediyl) | |
| | didodecan-2-ol (Tech G1) | |
| LNP13 | XTC | XTC/DSPC/Chol/PEG-DMG |
| | | 50/10/38.5/1.5 |
| | | Lipid:siRNA: 33:1 |
| LNP14 | MC3 | MC3/DSPC/Chol/PEG-DMG |
| | | 40/15/40/5 |
| | | Lipid:siRNA: 11:1 |
| LNP15 | MC3 | MC3/DSPC/Chol/PEG-DSG/ |
| | | GalNAc-PEG-DSG |
| | | 50/10/35/4.5/0.5 |
| | | Lipid:siRNA: 11:1 |
| LNP16 | MC3 | MC3/DSPC/Chol/PEG-DMG |
| | | 50/10/38.5/1.5 |
| | | Lipid:siRNA: 7:1 |
| LNP17 | MC3 | MC3/DSPC/Chol/PEG-DSG |
| | | 50/10/38.5/1.5 |
| | | Lipid:siRN: 10:1 |
| LNP18 | MC3 | MC3/DSPC/Chol/PEG-DMG |
| | | 50/10/38.5/1.5 |
| | | Lipid:siRNA: 12:1 |
| LNP19 | MC3 | MC3/DSPC/Chol/PEG-DMG |
| | | 50/10/35/5 |
| | | Lipid:siRNA: 8:1 |
| LNP20 | MC3 | MC3/DSPC/Chol/PEG-DPG |
| | | 50/10/38.5/1.5 |
| | | Lipid:siRNA: 10:1 |
| LNP21 | C12-200 | C12-200/DSPC/Chol/PEG-DSG |
| | | 50/10/38.5/1.5 |
| | | Lipid:siRNA: 7:1 |
| LNP22 | XTC | XTC/DSPC/Chol/PEG-DSG |
| | | 50/10/38.5/1.5 |
| | | Lipid:siRNA: 10:1 |

DSPC: distearoylphosphatidylcholine
DPPC: dipalmitoylphosphatidylcholine
PEG-DMG: PEG-didimyristoyl glycerol (C14-PEG, or PEG-C14) (PEG with avg mol wt of 2000)
PEG-DSG: PEG-distyryl glycerol (C18-PEG, or PEG-C18) (PEG with avg mol wt of 2000)
PEG-cDMA: PEG-carbomoyl-1,2-dimyristyloxypropylamine (PEG with avg mol wt of 2000)
SNALP (1,2-Dilinolenyloxy-N,N-dimethylaminopropane (DLinDMA)) comprising formulations are described in International Publication No. WO2009/127060, filed Apr. 15, 2009, which is hereby incorporated by reference.
XTC comprising formulations are described, e.g., in U.S. Provisional Serial No. 61/148,366, filed Jan. 29, 2009; U.S. Provisional Serial No. 61/156,851, filed Mar. 2, 2009; U.S. Provisional Serial No. filed Jun. 10, 2009; U.S. Provisional Serial No. 61/228,373, filed Jul. 24, 2009; U.S. Provisional Serial No. 61/239,686, filed Sep. 3, 2009, and International Application No. PCT/US2010/022614, filed Jan. 29, 2010, which are hereby incorporated by reference.
MC3 comprising formulations are described. e.g., in U.S. Publication No. 2010/0324120, filed Jun. 10, 2010, the entire contents of which are herevy incorporated by reference.
ALNY-100 comprising formulations are described, e.g., International patent application number PCT/US09/63933, filed on Nov. 10, 2009, which is hereby incorporated by reference.
C12-200 comprising formulations are described in U.S. Provisional Serial No. 61/175,770, filed May 5, 2009 and International Application No. PCT/US10/33777, filed May 5, 2010, which are hereby incorporated by reference.

### Synthesis of Ionizable Cationic Lipids

[0671] Any of the compounds, e.g., cationic lipids and the like, used in the nucleic acid-lipid particles of the invention can be prepared by known organic synthesis techniques, including the methods described in more detail in the Examples. All substituents are as defined below unless indicated otherwise.

[0672] “Alkyl” means a straight chain or branched, noncyclic or cyclic, saturated aliphatic hydrocarbon containing from 1 to 24 carbon atoms. Representative saturated straight chain alkyls include methyl, ethyl, n-propyl, n-butyl, n-pentyl, n-hexyl, and the like; while saturated branched alkyls include isopropyl, sec-butyl, isobutyl, tert-butyl, isopentyl, and the like. Representative saturated cyclic alkyls include cyclopropyl, cyclobutyl, cyclopentyl, cyclohexyl, and the like; while unsaturated cyclic alkyls include cyclopentenyl and cyclohexenyl, and the like.

[0673] “Alkenyl” means an alkyl, as defined above, containing at least one double bond between adjacent carbon atoms. Alkenyls include both cis and trans isomers. Representative straight chain and branched alkenyls include ethylenyl, propylenyl, 1-butenyl, 2-butenyl, isobutylenyl, 1-pentenyl, 2-pentenyl, 3-methyl-1-butenyl, 2-methyl-2-butenyl, 2,3-dimethyl-2-butenyl, and the like.

[0674] “Alkynyl” means any alkyl or alkenyl, as defined above, which additionally contains at least one triple bond between adjacent carbons. Representative straight chain and branched alkynyls include acetylenyl, propynyl, 1-butynyl, 2-butynyl, 1-pentynyl, 2-pentynyl, 3-methyl-1 butynyl, and the like.

[0675] “Acyl” means any alkyl, alkenyl, or alkynyl wherein the carbon at the point of attachment is substituted with an oxo group, as defined below. For example, —C(═O)alkyl, —C(—O)alkenyl, and —C(═O)alkynyl are acyl groups.

[0676] “Heterocycle” means a 5- to 7-membered monocyclic, or 7- to 10-membered bicyclic, heterocyclic ring which is either saturated, unsaturated, or aromatic, and which contains from 1 or 2 heteroatoms independently selected from nitrogen, oxygen and sulfur, and wherein the nitrogen and sulfur heteroatoms can be optionally oxidized, and the nitrogen heteroatom can be optionally quaternized, including bicyclic rings in which any of the above heterocycles are fused to a benzene ring. The heterocycle can be attached via any heteroatom or carbon atom. Heterocycles include heteroaryls as defined below. Heterocycles include morpholinyl, pyrrolidinonyl, pyrrolidinyl, piperidinyl, piperizynyl, hydantoinyl, valerolactamyl, oxiranyl, oxetanyl, tetrahydrofuranyl, tetrahydropyranyl, tetrahydropyridinyl, tetrahydroprimidinyl, tetrahydrothiophenyl, tetrahydrothiopyranyl, tetrahydropyrimidinyl, tetrahydrothiophenyl, tetrahydrothiopyranyl, and the like.

[0677] The terms “optionally substituted alkyl”, “optionally substituted alkenyl”, “optionally substituted alkynyl”, “optionally substituted acyl”, and “optionally substituted heterocycle” means that, when substituted, at least one hydrogen atom is replaced with a substituent. In the case of an oxo substituent (═O) two hydrogen atoms are replaced. In this regard, substituents include oxo, halogen, heterocycle, —CN, —ORx, —NRxRy, —NRxC(═O) Ry, —NRxSO2Ry, —C(—O)Rx, —C(—O)ORx, —C(═O) NRxRy, —SOnRx and —SOnNRxRy, wherein n is 0, 1 or 2, Rx and Ry are the same or different and independently hydrogen, alkyl or heterocycle, and each of said alkyl and heterocycle substituents can be further substituted with one or more of oxo, halogen, —OH, —CN, alkyl, —ORx,

heterocycle, —NRxRy, —NRxC(═O)Ry, —NRxSO2Ry, —C(═O)Rx, —C(═O)ORx, —C(═O)NRx Ry, —SOnRx and —SOnNRxRy.

[0678] “Halogen” means fluoro, chloro, bromo and iodo.

[0679] In some embodiments, the methods of the invention can require the use of protecting groups. Protecting group methodology is well known to those skilled in the art (see, for example, Protective Groups in Organic Synthesis, Green, T. W. et al., Wiley-Interscience, New York City, 1999). Briefly, protecting groups within the context of this invention are any group that reduces or eliminates unwanted reactivity of a functional group. A protecting group can be added to a functional group to mask its reactivity during certain reactions and then removed to reveal the original functional group. In some embodiments an “alcohol protecting group” is used. An “alcohol protecting group” is any group which decreases or eliminates unwanted reactivity of an alcohol functional group. Protecting groups can be added and removed using techniques well known in the art.

### Synthesis of Formula A

[0680] In some embodiments, nucleic acid-lipid particles of the invention are formulated using a cationic lipid of formula A:

[chemical structure]

where R1 and R2 are independently alkyl, alkenyl or alkynyl, each can be optionally substituted, and R3 and R4 are independently lower alkyl or R3 and R4 can be taken together to form an optionally substituted heterocyclic ring. In some embodiments, the cationic lipid is XTC (2,2-Dilinoleyl-4-dimethylaminoethyl-[1,3]-dioxolane). In general, the lipid of formula A above can be made by the following Reaction Schemes 1 or 2, wherein all substituents are as defined above unless indicated otherwise.

[chemical structure]

Lipid A, where R1 and R2 are independently alkyl, alkenyl or alkynyl, each can be optionally substituted, and R3 and R4 are independently lower alkyl or R3 and R4 can be taken together to form an optionally substituted heterocyclic ring, can be prepared according to Scheme 1. Ketone 1 and bromide 2 can be purchased or prepared according to methods known to those of ordinary skill in the art. Reaction of 1 and 2 yields ketal 3. Treatment of ketal 3 with amine 4 yields lipids of formula A. The lipids of formula A can be converted to the corresponding ammonium salt with an organic salt of formula 5, where X is anion counter ion selected from halogen, hydroxide, phosphate, sulfate, or the like.

[chemical structure]

[0681] Alternatively, the ketone 1 starting material can be prepared according to Scheme 2. Grignard reagent 6 and cyanide 7 can be purchased or prepared according to methods known to those of ordinary skill in the art. Reaction of 6 and 7 yields ketone 1. Conversion of ketone 1 to the corresponding lipids of formula A is as described in Scheme 1.

### Synthesis of MC3

[0682] Preparation of DLin-M-C3-DMA (i.e., (6Z,9Z,28Z,31Z)-heptatriaconta-6,9,28,31-tetraen-19-yl 4-(dimethylamino) butanoate) was as follows. A solution of (6Z,9Z,28Z,31Z)-heptatriaconta-6,9,28,31-tetraen-19-ol (0.53 g), 4-N,N-dimethylaminobutyric acid hydrochloride (0.51 g), 4-N,N-dimethylaminopyridine (0.61 g) and 1-ethyl-3-(3-dimethylaminopropyl) carbodiimide hydrochloride (0.53 g) in dichloromethane (5 mL) was stirred at room temperature overnight. The solution was washed with dilute hydrochloric acid followed by dilute aqueous sodium bicarbonate. The organic fractions were dried over anhydrous magnesium sulphate, filtered and the solvent removed on a rotovap. The residue was passed down a silica gel column (20 g) using a 1-5% methanol/dichloromethane elution gradient. Fractions containing the purified product were combined and the solvent removed, yielding a colorless oil (0.54 g). Synthesis of ALNY-100

[0683] Synthesis of ketal 519 [ALNY-100] was performed using the following scheme 3:

[chemical structure]

### Synthesis of 515

[0684] To a stirred suspension of LiAlH4 (3.74 g, 0.09852 mol) in 200 ml anhydrous THF in a two neck RBF (1 L), was added a solution of 514 (10 g, 0.04926 mol) in 70 mL of THF slowly at 0 0 C under nitrogen atmosphere. After complete addition, reaction mixture was warmed to room temperature and then heated to reflux for 4 h. Progress of the reaction was monitored by TLC. After completion of reaction (by TLC) the mixture was cooled to 0 0 C and quenched with careful addition of saturated Nₐ2SO4 solution. Reaction mixture was stirred for 4 h at room temperature and filtered off. Residue was washed well with THF. The filtrate and washings were mixed and diluted with 400 mL dioxane and 26 mL conc. HCl and stirred for 20 minutes at room temperature. The volatilities were stripped off under vacuum to furnish the hydrochloride salt of 515 as a white solid. Yield: 7.12 g 1H-NMR (DMSO, 400 MHZ): 8=9.34 (broad, 2H), 5.68 (s, 2H), 3.74 (m, 1H), 2.66-2.60 (m, 2H), 2.50-2.45 (m, 5H).

### Synthesis of 516

[0685] To a stirred solution of compound 515 in 100 mL dry DCM in a 250 mL two neck RBF, was added NEt3 (37.2 mL, 0.2669 mol) and cooled to 0 0 C under nitrogen atmosphere. After a slow addition of N-(benzyloxy-carbonyloxy)-succinimide (20 g, 0.08007 mol) in 50 mL dry DCM, reaction mixture was allowed to warm to room temperature. After completion of the reaction (2-3 h by TLC) mixture was washed successively with 1N HCl solution (1×100 mL) and saturated NaHCO₃ solution (1×50 mL). The organic layer was then dried over anhyd. Na2SO4 and the solvent was evaporated to give crude material which was purified by silica gel column chromatography to get 516 as sticky mass. Yield: 11 g (89%). 1H-NMR (CDCl3, 400 MHz): δ=7.36-7.27 (m, 5H), 5.69 (s, 2H), 5.12 (s, 2H), 4.96 (br., 1H) 2.74 (s, 3H), 2.60 (m, 2H), 2.30-2.25 (m, 2H). LC-MS [M+H]-232.3 (96.94%).

### Synthesis of 517A and 517B

[0686] The cyclopentene 516 (5 g, 0.02164 mol) was dissolved in a solution of 220 mL acetone and water (10:1) in a single neck 500 mL RBF and to it was added N-methyl morpholine-N-oxide (7.6 g, 0.06492 mol) followed by 4.2 mL of 7.6% solution of Os04 (0.275 g, 0.00108 mol) in tert-butanol at room temperature. After completion of the reaction (˜ 3 h), the mixture was quenched with addition of solid Nₐ2SO3 and resulting mixture was stirred for 1.5 h at room temperature. Reaction mixture was diluted with DCM (300 mL) and washed with water (2×100 mL) followed by saturated NaHCO₃ (1×50 mL) solution, water (1×30 mL) and finally with brine (1×50 mL). Organic phase was dried over an·Na2SO4 and solvent was removed in vacuum. Silica gel column chromatographic purification of the crude material was afforded a mixture of diastereomers, which were separated by prep HPLC. Yield: −6 g crude

[0687] 517A-Peak-1 (white solid), 5.13 g (96%). 1H-NMR (DMSO, 400 MHZ): 8=7.39-7.31 (m, 5H), 5.04 (s, 2H), 4.78-4.73 (m, 1H), 4.48-4.47 (d, 2H), 3.94-3.93 (m, 2H), 2.71 (s, 3H), 1.72-1.67 (m, 4H). LC-MS-[M+H]-266.3, [M+NH4+]-283.5 present, HPLC-97.86%. Stereochemistry confirmed by X-ray.

### Synthesis of 518

[0688] Using a procedure analogous to that described for the synthesis of compound 505, compound 518 (1.2 g, 41%) was obtained as a colorless oil. 1H-NMR (CDCl3, 400 MHZ): 8=7.35-7.33 (m, 4H), 7.30-7.27 (m, 1H), 5.37-5.27 (m, 8H), 5.12 (s, 2H), 4.75 (m, 1H), 4.58-4.57 (m, 2H), 2.78-2.74 (m, 7H), 2.06-2.00 (m, 8H), 1.96-1.91 (m, 2H), 1.62 (m, 4H), 1.48 (m, 2H), 1.37-1.25 (br m, 36H), 0.87 (m, 6H). HPLC-98.65%.

### General Procedure for the Synthesis of Compound 519

[0689] A solution of compound 518 (1 eq) in hexane (15 mL) was added in a drop-wise fashion to an ice-cold solution of LAH in THF (1 M, 2 eq). After complete addition, the mixture was heated at 400 C over 0.5 h then cooled again on an ice bath. The mixture was carefully hydrolyzed with saturated aqueous Na2SO4 then filtered through celite and reduced to an oil. Column chromatography provided the pure 519 (1.3 g, 68%) which was obtained as a colorless oil. 13C NMR 8=130.2, 130.1 (×2), 127.9 (×3), 112.3, 79.3, 64.4, 44.7, 38.3, 35.4, 31.5, 29.9 (×2), 29.7, 29.6 (×2), 29.5 (×3), 29.3 (×2), 27.2 (×3), 25.6, 24.5, 23.3, 226, 14.1; Electrospray MS (+ve): Molecular weight for C44H80NO2 (M+H)+ Calc. 654.6, Found 654.6.

[0690] Formulations prepared by either the standard or extrusion-free method can be characterized in similar manners. For example, formulations are typically characterized by visual inspection. They should be whitish translucent solutions free from aggregates or sediment. Particle size and particle size distribution of lipid-nanoparticles can be measured by light scattering using, for example, a Malvern Zetasizer Nano ZS (Malvern, USA). Particles should be about 20-300 nm, such as 40-100 nm in size. The particle size distribution should be unimodal. The total dsRNA concentration in the formulation, as well as the entrapped fraction, is estimated using a dye exclusion assay. A sample of the formulated dsRNA can be incubated with an RNA-binding dye, such as Ribogreen (Molecular Probes) in the presence or absence of a formulation disrupting surfactant, e.g., 0.5% Triton-X100. The total dsRNA in the formulation can be determined by the signal from the sample containing the surfactant, relative to a standard curve. The entrapped fraction is determined by subtracting the “free” dsRNA content (as measured by the signal in the absence of surfactant) from the total dsRNA content. Percent entrapped dsRNA is typically >85%. For SNALP formulation, the particle size is at least 30 nm, at least 40 nm, at least 50 nm, at least 60 nm, at least 70 nm, at least 80 nm, at least 90 nm, at least 100 nm, at least 110 nm, and at least 120 nm. The suitable range is typically about at least 50 nm to about at least 110 nm, about at least 60 nm to about at least 100 nm, or about at least 80 nm to about at least 90 nm.

[0691] Compositions and formulations for oral administration include powders or granules, microparticulates, nanoparticulates, suspensions or solutions in water or non-aqueous media, capsules, gel capsules, sachets, tablets or minitablets. Thickeners, flavoring agents, diluents, emulsifiers, dispersing aids or binders can be desirable. In some embodiments, oral formulations are those in which dsRNAs featured in the invention are administered in conjunction with one or more penetration enhancer surfactants and chelators. Suitable surfactants include fatty acids and/or esters or salts thereof, bile acids and/or salts thereof. Suitable bile acids/salts include chenodeoxycholic acid (CDCA) and ursodeoxychenodeoxycholic acid (UDCA), cholic acid, dehydrocholic acid, deoxycholic acid, glucholic acid, glycholic acid, glycodeoxycholic acid, taurocholic acid, taurodeoxycholic acid, sodium tauro-24,25-dihydro-fusidate and sodium glycodihydrofusidate. Suitable fatty acids include arachidonic acid, undecanoic acid, oleic acid, lauric acid, caprylic acid, capric acid, myristic acid, palmitic acid, stearic acid, linoleic acid, linolenic acid, dicaprate, tricaprate, monoolein, dilaurin, glyceryl 1-monocaprate, 1-dodecylazacycloheptan-2-one, an acylcarnitine, an acylcholine, or a monoglyceride, a diglyceride or a pharmaceutically acceptable salt thereof (e.g., sodium). In some embodiments, combinations of penetration enhancers are used, for example, fatty acids/salts in combination with bile acids/salts. One exemplary combination is the sodium salt of lauric acid, capric acid and UDCA. Further penetration enhancers include polyoxyethylene-9-lauryl ether, polyoxyethylene-20-cetyl ether. DsRNAs featured in the invention can be delivered orally, in granular form including sprayed dried particles, or complexed to form micro or nanoparticles. DsRNA complexing agents include poly-amino acids; polyimines; polyacrylates; polyalkylacrylates, polyoxethanes, polyalkylcyanoacrylates; cationized gelatins, albumins, starches, acrylates, polyethyleneglycols (PEG) and starches; polyalkylcyanoacrylates; DEAE-derivatized polyimines, pollulans, celluloses and starches. Suitable complexing agents include chitosan, N-trimethylchitosan, poly-L-lysine, polyhistidine, polyornithine, polyspermines, protamine, polyvinylpyridine, polythiodiethylaminomethylethylene P (TDAE), polyaminostyrene (e.g., p-amino), poly(methylcyanoacrylate), poly(ethylcyanoacrylate), poly(butylcyanoacrylate), poly(isobutylcyanoacrylate), poly(isohexylcynaoacrylate), DEAE-methacrylate, DEAE-hexylacrylate, DEAE-acrylamide, DEAE-albumin and DEAE-dextran, polymethylacrylate, polyhexylacrylate, poly(D,L-lactic acid), poly(DL-lactic-co-glycolic acid (PLGA), alginate, and polyethyleneglycol (PEG). Oral formulations for dsRNAs and their preparation are described in detail in U.S. Pat. No. 6,887,906, US Publn. No. 20030027780, and U.S. Pat. No. 6,747,014, each of which is incorporated herein by reference.

[0692] Compositions and formulations for parenteral, intraparenchymal (into the brain), intrathecal, intraventricular or intrahepatic administration can include sterile aqueous solutions which can also contain buffers, diluents and other suitable additives such as, but not limited to, penetration enhancers, carrier compounds and other pharmaceutically acceptable carriers or excipients.

[0693] Pharmaceutical compositions of the present invention include, but are not limited to, solutions, emulsions, and liposome-containing formulations. These compositions can be generated from a variety of components that include, but are not limited to, preformed liquids, self-emulsifying solids and self-emulsifying semisolids. Particularly preferred are formulations that target the liver when treating hepatic disorders such as hepatic carcinoma.

[0694] The pharmaceutical formulations of the present invention, which can conveniently be presented in unit dosage form, can be prepared according to conventional techniques well known in the pharmaceutical industry. Such techniques include the step of bringing into association the active ingredients with the pharmaceutical carrier(s) or excipient(s). In general, the formulations are prepared by uniformly and intimately bringing into association the active ingredients with liquid carriers or finely divided solid carriers or both, and then, if necessary, shaping the product.

[0695] The compositions of the present invention can be formulated into any of many possible dosage forms such as, but not limited to, tablets, capsules, gel capsules, liquid syrups, soft gels, suppositories, and enemas. The compositions of the present invention can also be formulated as suspensions in aqueous, non-aqueous or mixed media. Aqueous suspensions can further contain substances which increase the viscosity of the suspension including, for example, sodium carboxymethylcellulose, sorbitol and/or dextran. The suspension can also contain stabilizers.

### C. Additional Formulations

i. Emulsions

[0696] The compositions of the present invention can be prepared and formulated as emulsions. Emulsions are typically heterogeneous systems of one liquid dispersed in another in the form of droplets usually exceeding 0.1 μm in diameter (see e.g., Ansel's Pharmaceutical Dosage Forms and Drug Delivery Systems, Allen, LV., Popovich N G., and Ansel H C., 2004, Lippincott Williams & Wilkins (8th ed.), New York, NY; Idson, in Pharmaceutical Dosage Forms, Lieberman, Rieger and Banker (Eds.), 1988, Marcel Dekker, Inc., New York, N.Y., volume 1, p. 199; Rosoff, in Pharmaceutical Dosage Forms, Lieberman, Rieger and Banker (Eds.), 1988, Marcel Dekker, Inc., New York, N.Y., Volume 1, p. 245; Block in Pharmaceutical Dosage Forms, Lieberman, Rieger and Banker (Eds.), 1988, Marcel Dekker, Inc., New York, N.Y., volume 2, p. 335; Higuchi et al., in Remington's Pharmaceutical Sciences, Mack Publishing Co., Easton, Pa., 1985, p. 301). Emulsions are often biphasic systems comprising two immiscible liquid phases intimately mixed and dispersed with each other. In general, emulsions can be of either the water-in-oil (w/o) or the oil-in-water (o/w) variety. When an aqueous phase is finely divided into and dispersed as minute droplets into a bulk oily phase, the resulting composition is called a water-in-oil (w/o) emulsion. Alternatively, when an oily phase is finely divided into and dispersed as minute droplets into a bulk aqueous phase, the resulting composition is called an oil-in-water (o/w) emulsion. Emulsions can contain additional components in addition to the dispersed phases, and the active drug which can be present as a solution in either the aqueous phase, oily phase or itself as a separate phase. Pharmaceutical excipients such as emulsifiers, stabilizers, dyes, and anti-oxidants can also be present in emulsions as needed. Pharmaceutical emulsions can also be multiple emulsions that are comprised of more than two phases such as, for example, in the case of oil-in-water-in-oil (o/w/o) and water-in-oil-in-water (w/o/w) emulsions. Such complex formulations often provide certain advantages that simple binary emulsions do not. Multiple emulsions in which individual oil droplets of an o/w emulsion enclose small water droplets constitute a w/o/w emulsion. Likewise a system of oil droplets enclosed in globules of water stabilized in an oily continuous phase provides an o/w/o emulsion.

[0697] Emulsions are characterized by little or no thermodynamic stability. Often, the dispersed or discontinuous phase of the emulsion is well dispersed into the external or continuous phase and maintained in this form through the means of emulsifiers or the viscosity of the formulation. Either of the phases of the emulsion can be a semisolid or a solid, as is the case of emulsion-style ointment bases and creams. Other means of stabilizing emulsions entail the use of emulsifiers that can be incorporated into either phase of the emulsion. Emulsifiers can broadly be classified into four categories: synthetic surfactants, naturally occurring emulsifiers, absorption bases, and finely dispersed solids (see e.g., Ansel's Pharmaceutical Dosage Forms and Drug Delivery Systems, Allen, LV., Popovich N G., and Ansel H C., 2004, Lippincott Williams & Wilkins (8th ed.), New York, NY; Idson, in Pharmaceutical Dosage Forms, Lieberman, Rieger and Banker (Eds.), 1988, Marcel Dekker, Inc., New York, N.Y., volume 1, p. 199).

[0698] Synthetic surfactants, also known as surface active agents, have found wide applicability in the formulation of emulsions and have been reviewed in the literature (see e.g., Ansel's Pharmaceutical Dosage Forms and Drug Delivery Systems, Allen, LV., Popovich N G., and Ansel H C., 2004, Lippincott Williams & Wilkins (8th ed.), New York, NY; Rieger, in Pharmaceutical Dosage Forms, Lieberman, Rieger and Banker (Eds.), 1988, Marcel Dekker, Inc., New York, N.Y., volume 1, p. 285; Idson, in Pharmaceutical Dosage Forms, Lieberman, Rieger and Banker (Eds.), Marcel Dekker, Inc., New York, N.Y., 1988, volume 1, p. 199). Surfactants are typically amphiphilic and comprise a hydrophilic and a hydrophobic portion. The ratio of the hydrophilic to the hydrophobic nature of the surfactant has been termed the hydrophile/lipophile balance (HLB) and is a valuable tool in categorizing and selecting surfactants in the preparation of formulations. Surfactants can be classified into different classes based on the nature of the hydrophilic group: nonionic, anionic, cationic and amphoteric (see e.g., Ansel's Pharmaceutical Dosage Forms and Drug Delivery Systems, Allen, LV., Popovich N G., and Ansel H C., 2004, Lippincott Williams & Wilkins (8th ed.), New York, NY Rieger, in Pharmaceutical Dosage Forms, Lieberman, Rieger and Banker (Eds.), 1988, Marcel Dekker, Inc., New York, N.Y., volume 1, p. 285).

[0699] Naturally occurring emulsifiers used in emulsion formulations include lanolin, beeswax, phosphatides, lecithin and acacia. Absorption bases possess hydrophilic properties such that they can soak up water to form w/o emulsions yet retain their semisolid consistencies, such as anhydrous lanolin and hydrophilic petrolatum. Finely divided solids have also been used as good emulsifiers especially in combination with surfactants and in viscous preparations. These include polar inorganic solids, such as heavy metal hydroxides, nonswelling clays such as bentonite, attapulgite, hectorite, kaolin, montmorillonite, colloidal aluminum silicate and colloidal magnesium aluminum silicate, pigments and nonpolar solids such as carbon or glyceryl tristearate.

[0700] A large variety of non-emulsifying materials are also included in emulsion formulations and contribute to the properties of emulsions. These include fats, oils, waxes, fatty acids, fatty alcohols, fatty esters, humectants, hydrophilic colloids, preservatives and antioxidants (Block, in Pharmaceutical Dosage Forms, Lieberman, Rieger and Banker (Eds.), 1988, Marcel Dekker, Inc., New York, N.Y., volume 1, p. 335; Idson, in Pharmaceutical Dosage Forms, Lieberman, Rieger and Banker (Eds.), 1988, Marcel Dekker, Inc., New York, N.Y., volume 1, p. 199).

[0701] Hydrophilic colloids or hydrocolloids include naturally occurring gums and synthetic polymers such as polysaccharides (for example, acacia, agar, alginic acid, carrageenan, guar gum, karaya gum, and tragacanth), cellulose derivatives (for example, carboxymethylcellulose and carboxypropylcellulose), and synthetic polymers (for example, carbomers, cellulose ethers, and carboxyvinyl polymers). These disperse or swell in water to form colloidal solutions that stabilize emulsions by forming strong interfacial films around the dispersed-phase droplets and by increasing the viscosity of the external phase.

[0702] Since emulsions often contain a number of ingredients such as carbohydrates, proteins, sterols and phosphatides that can readily support the growth of microbes, these formulations often incorporate preservatives. Commonly used preservatives included in emulsion formulations include methyl paraben, propyl paraben, quaternary ammonium salts, benzalkonium chloride, esters of p-hydroxybenzoic acid, and boric acid. Antioxidants are also commonly added to emulsion formulations to prevent deterioration of the formulation. Antioxidants used can be free radical scavengers such as tocopherols, alkyl gallates, butylated hydroxyanisole, butylated hydroxytoluene, or reducing agents such as ascorbic acid and sodium metabisulfite, and antioxidant synergists such as citric acid, tartaric acid, and lecithin.

[0703] The application of emulsion formulations via dermatological, oral and parenteral routes and methods for their manufacture have been reviewed in the literature (see e.g., Ansel's Pharmaceutical Dosage Forms and Drug Delivery Systems, Allen, LV., Popovich N G., and Ansel H C., 2004, Lippincott Williams & Wilkins (8th ed.), New York, NY; Idson, in Pharmaceutical Dosage Forms, Lieberman, Rieger and Banker (Eds.), 1988, Marcel Dekker, Inc., New York, N.Y., volume 1, p. 199). Emulsion formulations for oral delivery have been very widely used because of ease of formulation, as well as efficacy from an absorption and bioavailability standpoint (see e.g., Ansel's Pharmaceutical Dosage Forms and Drug Delivery Systems, Allen, LV., Popovich N G., and Ansel H C., 2004, Lippincott Williams & Wilkins (8th ed.), New York, NY; Rosoff, in Pharmaceutical Dosage Forms, Lieberman, Rieger and Banker (Eds.), 1988, Marcel Dekker, Inc., New York, N.Y., volume 1, p. 245; Idson, in Pharmaceutical Dosage Forms, Lieberman, Rieger and Banker (Eds.), 1988, Marcel Dekker, Inc., New York, N.Y., volume 1, p. 199). Mineral-oil base laxatives, oil-soluble vitamins and high fat nutritive preparations are among the materials that have commonly been administered orally as o/w emulsions.

ii. Microemulsions

[0704] In one embodiment of the present invention, the compositions of iRNAs and nucleic acids are formulated as microemulsions. A microemulsion can be defined as a system of water, oil and amphiphile which is a single optically isotropic and thermodynamically stable liquid solution (see e.g., Ansel's Pharmaceutical Dosage Forms and Drug Delivery Systems, Allen, LV., Popovich N G., and Ansel H C., 2004, Lippincott Williams & Wilkins (8th ed.), New York, NY; Rosoff, in Pharmaceutical Dosage Forms, Lieberman, Rieger and Banker (Eds.), 1988, Marcel Dekker, Inc., New York, N.Y., volume 1, p. 245). Typically microemulsions are systems that are prepared by first dispersing an oil in an aqueous surfactant solution and then adding a sufficient amount of a fourth component, generally an intermediate chain-length alcohol to form a transparent system. Therefore, microemulsions have also been described as thermodynamically stable, isotropically clear dispersions of two immiscible liquids that are stabilized by interfacial films of surface-active molecules (Leung and Shah, in: Controlled Release of Drugs: Polymers and Aggregate Systems, Rosoff, M., Ed., 1989, VCH Publishers, New York, pages 185-215). Microemulsions commonly are prepared via a combination of three to five components that include oil, water, surfactant, cosurfactant and electrolyte. Whether the microemulsion is of the water-in-oil (w/o) or an oil-in-water (o/w) type is dependent on the properties of the oil and surfactant used and on the structure and geometric packing of the polar heads and hydrocarbon tails of the surfactant molecules (Schott, in Remington's Pharmaceutical Sciences, Mack Publishing Co., Easton, Pa., 1985, p. 271).

[0705] The phenomenological approach utilizing phase diagrams has been extensively studied and has yielded a comprehensive knowledge, to one skilled in the art, of how to formulate microemulsions (see e.g., Ansel's Pharmaceutical Dosage Forms and Drug Delivery Systems, Allen, LV., Popovich N G., and Ansel H C., 2004, Lippincott Williams & Wilkins (8th ed.), New York, NY; Rosoff, in Pharmaceutical Dosage Forms, Lieberman, Rieger and Banker (Eds.), 1988, Marcel Dekker, Inc., New York, N.Y., volume 1, p. 245; Block, in Pharmaceutical Dosage Forms, Lieberman, Rieger and Banker (Eds.), 1988, Marcel Dekker, Inc., New York, N.Y., volume 1, p. 335). Compared to conventional emulsions, microemulsions offer the advantage of solubilizing water-insoluble drugs in a formulation of thermodynamically stable droplets that are formed spontaneously.

[0706] Surfactants used in the preparation of microemulsions include, but are not limited to, ionic surfactants, non-ionic surfactants, Brij 96, polyoxyethylene oleyl ethers, polyglycerol fatty acid esters, tetraglycerol monolaurate (ML310), tetraglycerol monooleate (MO310), hexaglycerol monooleate (PO310), hexaglycerol pentaoleate (PO500), decaglycerol monocaprate (MCA750), decaglycerol monooleate (MO750), decaglycerol sequioleate (SO750), decaglycerol decaoleate (DAO750), alone or in combination with cosurfactants. The cosurfactant, usually a short-chain alcohol such as ethanol, 1-propanol, and 1-butanol, serves to increase the interfacial fluidity by penetrating into the surfactant film and consequently creating a disordered film because of the void space generated among surfactant molecules. Microemulsions can, however, be prepared without the use of cosurfactants and alcohol-free self-emulsifying microemulsion systems are known in the art. The aqueous phase can typically be, but is not limited to, water, an aqueous solution of the drug, glycerol, PEG300, PEG400, polyglycerols, propylene glycols, and derivatives of ethylene glycol. The oil phase can include, but is not limited to, materials such as Captex 300, Captex 355, Capmul MCM, fatty acid esters, medium chain (C8-C12) mono, di, and tri-glycerides, polyoxyethylated glyceryl fatty acid esters, fatty alcohols, polyglycolized glycerides, saturated polyglycolized C8-C10 glycerides, vegetable oils and silicone oil.

[0707] Microemulsions are particularly of interest from the standpoint of drug solubilization and the enhanced absorption of drugs. Lipid based microemulsions (both o/w and w/o) have been proposed to enhance the oral bioavailability of drugs, including peptides (see e.g., U.S. Pat. Nos. 6,191,105; 7,063,860; 7,070,802; 7,157,099; Constantinides et al., Pharmaceutical Research, 1994, 11, 1385-1390; Ritschel, Meth. Find. Exp. Clin. Pharmacol., 1993, 13, 205). Microemulsions afford advantages of improved drug solubilization, protection of drug from enzymatic hydrolysis, possible enhancement of drug absorption due to surfactant-induced alterations in membrane fluidity and permeability, ease of preparation, ease of oral administration over solid dosage forms, improved clinical potency, and decreased toxicity (see e.g., U.S. Pat. Nos. 6,191,105; 7,063,860; 7,070,802; 7,157,099; Constantinides et al., Pharmaceutical Research, 1994, 11, 1385; Ho et al., J. Pharm. Sci., 1996, 85, 138-143). Often microemulsions can form spontaneously when their components are brought together at ambient temperature. This can be particularly advantageous when formulating thermolabile drugs, peptides or iRNAs. Microemulsions have also been effective in the transdermal delivery of active components in both cosmetic and pharmaceutical applications. It is expected that the microemulsion compositions and formulations of the present invention will facilitate the increased systemic absorption of iRNAs and nucleic acids from the gastrointestinal tract, as well as improve the local cellular uptake of iRNAs and nucleic acids.

[0708] Microemulsions of the present invention can also contain additional components and additives such as sorbitan monostearate (Grill 3), Labrasol, and penetration enhancers to improve the properties of the formulation and to enhance the absorption of the iRNAs and nucleic acids of the present invention. Penetration enhancers used in the microemulsions of the present invention can be classified as belonging to one of five broad categories—surfactants, fatty acids, bile salts, chelating agents, and non-chelating non-surfactants (Lee et al., Critical Reviews in Therapeutic Drug Carrier Systems, 1991, p. 92). Each of these classes has been discussed above.

iii. Microparticles

[0709] an RNAi agent of the invention may be incorporated into a particle, e.g., a microparticle. Microparticles can be produced by spray-drying, but may also be produced by other methods including lyophilization, evaporation, fluid bed drying, vacuum drying, or a combination of these techniques.

iv. Penetration Enhancers

[0710] In one embodiment, the present invention employs various penetration enhancers to effect the efficient delivery of nucleic acids, particularly iRNAs, to the skin of animals. Most drugs are present in solution in both ionized and nonionized forms. However, usually only lipid soluble or lipophilic drugs readily cross cell membranes. It has been discovered that even non-lipophilic drugs can cross cell membranes if the membrane to be crossed is treated with a penetration enhancer. In addition to aiding the diffusion of non-lipophilic drugs across cell membranes, penetration enhancers also enhance the permeability of lipophilic drugs.

[0711] Penetration enhancers can be classified as belonging to one of five broad categories, i.e., surfactants, fatty acids, bile salts, chelating agents, and non-chelating non-surfactants (see e.g., Malmsten, M. Surfactants and polymers in drug delivery, Informa Health Care, New York, NY, 2002; Lee et al., Critical Reviews in Therapeutic Drug Carrier Systems, 1991, p. 92). Each of the above mentioned classes of penetration enhancers are described below in greater detail.

[0712] Surfactants (or “surface-active agents”) are chemical entities which, when dissolved in an aqueous solution, reduce the surface tension of the solution or the interfacial tension between the aqueous solution and another liquid, with the result that absorption of iRNAs through the mucosa is enhanced. In addition to bile salts and fatty acids, these penetration enhancers include, for example, sodium lauryl sulfate, polyoxyethylene-9-lauryl ether and polyoxyethylene-20-cetyl ether) (see e.g., Malmsten, M. Surfactants and polymers in drug delivery, Informa Health Care, New York, NY, 2002; Lee et al., Critical Reviews in Therapeutic Drug Carrier Systems, 1991, p. 92); and perfluorochemical emulsions, such as FC-43. Takahashi et al., J. Pharm. Pharmacol., 1988, 40, 252).

[0713] Various fatty acids and their derivatives which act as penetration enhancers include, for example, oleic acid, lauric acid, capric acid (n-decanoic acid), myristic acid, palmitic acid, stearic acid, linoleic acid, linolenic acid, dicaprate, tricaprate, monoolein (1-monooleoyl-rac-glycerol), dilaurin, caprylic acid, arachidonic acid, glycerol 1-monocaprate, 1-dodecylazacycloheptan-2-one, acylcarnitines, acylcholines, C1-20 alkyl esters thereof (e.g., methyl, isopropyl and t-butyl), and mono- and di-glycerides thereof (i.e., oleate, laurate, caprate, myristate, palmitate, stearate, linoleate, etc.) (see e.g., Touitou, E., et al. Enhancement in Drug Delivery, CRC Press, Danvers, MA, 2006; Lee et al., Critical Reviews in Therapeutic Drug Carrier Systems, 1991, p. 92; Muranishi, Critical Reviews in Therapeutic Drug Carrier Systems, 1990, 7, 1-33; El Hariri et al., J. Pharm. Pharmacol., 1992, 44, 651-654).

[0714] The physiological role of bile includes the facilitation of dispersion and absorption of lipids and fat-soluble vitamins (see e.g., Malmsten, M. Surfactants and polymers in drug delivery, Informa Health Care, New York, NY, 2002; Brunton, Chapter 38 in: Goodman & Gilman's The Pharmacological Basis of Therapeutics, 9th Ed., Hardman et al. Eds., McGraw-Hill, New York, 1996, pp. 934-935). Various natural bile salts, and their synthetic derivatives, act as penetration enhancers. Thus the term “bile salts” includes any of the naturally occurring components of bile as well as any of their synthetic derivatives. Suitable bile salts include, for example, cholic acid (or its pharmaceutically acceptable sodium salt, sodium cholate), dehydrocholic acid (sodium dehydrocholate), deoxycholic acid (sodium deoxycholate), glucholic acid (sodium glucholate), glycholic acid (sodium glycocholate), glycodeoxycholic acid (sodium glycodeoxycholate), taurocholic acid (sodium taurocholate), taurodeoxycholic acid (sodium taurodeoxycholate), chenodeoxycholic acid (sodium chenodeoxycholate), ursodeoxycholic acid (UDCA), sodium tauro-24,25-dihydro-fusidate (STDHF), sodium glycodihydrofusidate and polyoxyethylene-9-lauryl ether (POE) (see e.g., Malmsten, M. Surfactants and polymers in drug delivery, Informa Health Care, New York, NY, 2002; Lee et al., Critical Reviews in Therapeutic Drug Carrier Systems, 1991, page 92; Swinyard, Chapter 39 In: Remington's Pharmaceutical Sciences, 18th Ed., Gennaro, ed., Mack Publishing Co., Easton, Pa., 1990, pages 782-783; Muranishi, Critical Reviews in Therapeutic Drug Carrier Systems, 1990, 7, 1-33; Yamamoto et al., J. Pharm. Exp. Ther., 1992, 263, 25; Yamashita et al., J. Pharm. Sci., 1990, 79, 579-583).

[0715] Chelating agents, as used in connection with the present invention, can be defined as compounds that remove metallic ions from solution by forming complexes therewith, with the result that absorption of iRNAs through the mucosa is enhanced. With regards to their use as penetration enhancers in the present invention, chelating agents have the added advantage of also serving as DNase inhibitors, as most characterized DNA nucleases require a divalent metal ion for catalysis and are thus inhibited by chelating agents (Jarrett, J. Chromatogr., 1993, 618, 315-339). Suitable chelating agents include but are not limited to disodium ethylenediaminetetraacetate (EDTA), citric acid, salicylates (e.g., sodium salicylate, 5-methoxysalicylate and homovanilate), N-acyl derivatives of collagen, laureth-9 and N-amino acyl derivatives of beta-diketones (enamines) (see e.g., Katdare, A. et al., Excipient development for pharmaceutical, biotechnology, and drug delivery, CRC Press, Danvers, MA, 2006; Lee et al., Critical Reviews in Therapeutic Drug Carrier Systems, 1991, page 92; Muranishi, Critical Reviews in Therapeutic Drug Carrier Systems, 1990, 7, 1-33; Buur et al., J. Control Rel., 1990, 14, 43-51).

[0716] As used herein, non-chelating non-surfactant penetration enhancing compounds can be defined as compounds that demonstrate insignificant activity as chelating agents or as surfactants but that nonetheless enhance absorption of iRNAs through the alimentary mucosa (see e.g., Muranishi, Critical Reviews in Therapeutic Drug Carrier Systems, 1990, 7, 1-33). This class of penetration enhancers includes, for example, unsaturated cyclic ureas, 1-alkyl- and 1-alkenylazacyclo-alkanone derivatives (Lee et al., Critical Reviews in Therapeutic Drug Carrier Systems, 1991, page 92); and non-steroidal anti-inflammatory agents such as diclofenac sodium, indomethacin and phenylbutazone (Yamashita et al., J. Pharm. Pharmacol., 1987, 39, 621-626).

[0717] Agents that enhance uptake of iRNAs at the cellular level can also be added to the pharmaceutical and other compositions of the present invention. For example, cationic lipids, such as lipofectin (Junichi et al, U.S. Pat. No. 5,705,188), cationic glycerol derivatives, and polycationic molecules, such as polylysine (Lollo et al., PCT Application WO 97/30731), are also known to enhance the cellular uptake of dsRNAs. Examples of commercially available transfection reagents include, for example Lipofectamine™ (Invitrogen; Carlsbad, CA), Lipofectamine 2000™ (Invitrogen; Carlsbad, CA), 293fectin™ (Invitrogen; Carlsbad, CA), Cellfectin™ (Invitrogen; Carlsbad, CA), DMRIE-C™ (Invitrogen; Carlsbad, CA), FreeStyle™ MAX (Invitrogen; Carlsbad, CA), Lipofectamine™ 2000 CD (Invitrogen; Carlsbad, CA), Lipofectamine™ (Invitrogen; Carlsbad, CA), RNAiMAX (Invitrogen; Carlsbad, CA), Oligofectamine™ (Invitrogen; Carlsbad, CA), Optifect™ (Invitrogen; Carlsbad, CA), X-tremeGENE Q2 Transfection Reagent (Roche; Grenzacherstrasse, Switzerland), DOTAP Liposomal Transfection Reagent (Grenzacherstrasse, Switzerland), DOSPER Liposomal Transfection Reagent (Grenzacherstrasse, Switzerland), or Fugene (Grenzacherstrasse, Switzerland), Transfectam® Reagent (Promega; Madison, WI), TransFast™ Transfection Reagent (Promega; Madison, WI), Tfx™-20 Reagent (Promega; Madison, WI), Tfx™-50 Reagent (Promega; Madison, WI), DreamFect™ (OZ Biosciences; Marseille, France), EcoTransfect (OZ Biosciences; Marseille, France), TransPassa D1 Transfection Reagent (New England Biolabs; Ipswich, MA, USA), LyoVec™/LipoGen™ (Invitrogen; San Diego, CA, USA), PerFectin Transfection Reagent (Genlantis; San Diego, CA, USA), NeuroPORTER Transfection Reagent (Genlantis; San Diego, CA, USA), GenePORTER Transfection reagent (Genlantis; San Diego, CA, USA), GenePORTER 2 Transfection reagent (Genlantis; San Diego, CA, USA), Cytofectin Transfection Reagent (Genlantis; San Diego, CA, USA), BaculoPORTER Transfection Reagent (Genlantis; San Diego, CA, USA), TroganPORTER™ transfection Reagent (Genlantis; San Diego, CA, USA), RiboFect (Bioline; Taunton, MA, USA), PlasFect (Bioline; Taunton, MA, USA), UniFECTOR (B-Bridge International; Mountain View, CA, USA), SureFECTOR (B-Bridge International; Mountain View, CA, USA), or HiFect™ (B-Bridge International, Mountain View, CA, USA), among others.

[0718] Other agents can be utilized to enhance the penetration of the administered nucleic acids, including glycols such as ethylene glycol and propylene glycol, pyrrols such as 2-pyrrol, azones, and terpenes such as limonene and menthone.

v. Carriers

[0719] Certain compositions of the present invention also incorporate carrier compounds in the formulation. As used herein, “carrier compound” or “carrier” can refer to a nucleic acid, or analog thereof, which is inert (i.e., does not possess biological activity per se) but is recognized as a nucleic acid by in vivo processes that reduce the bioavailability of a nucleic acid having biological activity by, for example, degrading the biologically active nucleic acid or promoting its removal from circulation. The coadministration of a nucleic acid and a carrier compound, typically with an excess of the latter substance, can result in a substantial reduction of the amount of nucleic acid recovered in the liver, kidney or other extracirculatory reservoirs, presumably due to competition between the carrier compound and the nucleic acid for a common receptor. For example, the recovery of a partially phosphorothioate dsRNA in hepatic tissue can be reduced when it is coadministered with polyinosinic acid, dextran sulfate, polycytidic acid or 4-acetamido-4′isothiocyano-stilbene-2,2′-disulfonic acid (Miyao et al., DsRNA Res. Dev., 1995, 5, 115-121; Takakura et al., DsRNA & Nucl. Acid Drug Dev., 1996, 6, 177-183.

vi. Excipients

[0720] In contrast to a carrier compound, a “pharmaceutical carrier” or “excipient” is a pharmaceutically acceptable solvent, suspending agent or any other pharmacologically inert vehicle for delivering one or more nucleic acids to an animal. The excipient can be liquid or solid and is selected, with the planned manner of administration in mind, so as to provide for the desired bulk, consistency, etc., when combined with a nucleic acid and the other components of a given pharmaceutical composition. Typical pharmaceutical carriers include, but are not limited to, binding agents (e.g., pregelatinized maize starch, polyvinylpyrrolidone or hydroxypropyl methylcellulose, etc.); fillers (e.g., lactose and other sugars, microcrystalline cellulose, pectin, gelatin, calcium sulfate, ethyl cellulose, polyacrylates or calcium hydrogen phosphate, etc.); lubricants (e.g., magnesium stearate, talc, silica, colloidal silicon dioxide, stearic acid, metallic stearates, hydrogenated vegetable oils, corn starch, polyethylene glycols, sodium benzoate, sodium acetate, etc.); disintegrants (e.g., starch, sodium starch glycolate, etc.); and wetting agents (e.g., sodium lauryl sulphate, etc).

[0721] Pharmaceutically acceptable organic or inorganic excipients suitable for non-parenteral administration which do not deleteriously react with nucleic acids can also be used to formulate the compositions of the present invention. Suitable pharmaceutically acceptable carriers include, but are not limited to, water, salt solutions, alcohols, polyethylene glycols, gelatin, lactose, amylose, magnesium stearate, talc, silicic acid, viscous paraffin, hydroxymethylcellulose, polyvinylpyrrolidone and the like.

[0722] Formulations for topical administration of nucleic acids can include sterile and non-sterile aqueous solutions, non-aqueous solutions in common solvents such as alcohols, or solutions of the nucleic acids in liquid or solid oil bases. The solutions can also contain buffers, diluents and other suitable additives. Pharmaceutically acceptable organic or inorganic excipients suitable for non-parenteral administration which do not deleteriously react with nucleic acids can be used.

[0723] Suitable pharmaceutically acceptable excipients include, but are not limited to, water, salt solutions, alcohol, polyethylene glycols, gelatin, lactose, amylose, magnesium stearate, talc, silicic acid, viscous paraffin, hydroxymethylcellulose, polyvinylpyrrolidone and the like.

vii. Other Components

[0724] The compositions of the present invention can additionally contain other adjunct components conventionally found in pharmaceutical compositions, at their art-established usage levels. Thus, for example, the compositions can contain additional, compatible, pharmaceutically-active materials such as, for example, antipruritics, astringents, local anesthetics or anti-inflammatory agents, or can contain additional materials useful in physically formulating various dosage forms of the compositions of the present invention, such as dyes, flavoring agents, preservatives, antioxidants, opacifiers, thickening agents and stabilizers. However, such materials, when added, should not unduly interfere with the biological activities of the components of the compositions of the present invention. The formulations can be sterilized and, if desired, mixed with auxiliary agents, e.g., lubricants, preservatives, stabilizers, wetting agents, emulsifiers, salts for influencing osmotic pressure, buffers, colorings, flavorings and/or aromatic substances and the like which do not deleteriously interact with the nucleic acid(s) of the formulation.

[0725] Aqueous suspensions can contain substances which increase the viscosity of the suspension including, for example, sodium carboxymethylcellulose, sorbitol and/or dextran. The suspension can also contain stabilizers.

[0726] In some embodiments, pharmaceutical compositions featured in the invention include (a) one or more iRNA compounds and (b) one or more agents which function by a non-RNAi mechanism and which are useful in treating a hemolytic disorder. Examples of such agents include, but are not limited to an anti-inflammatory agent, anti-steatosis agent, anti-viral, and/or anti-fibrosis agent. In addition, other substances commonly used to protect the liver, such as silymarin, can also be used in conjunction with the iRNAs described herein. Other agents useful for treating liver diseases include telbivudine, entecavir, and protease inhibitors such as telaprevir and other disclosed, for example, in Tung et al., U.S. Application Publication Nos. 2005/0148548, 2004/0167116, and 2003/0144217; and in Hale et al., U.S. Application Publication No. 2004/0127488.

[0727] Toxicity and therapeutic efficacy of such compounds can be determined by standard pharmaceutical procedures in cell cultures or experimental animals, e.g., for determining the LD50 (the dose lethal to 50% of the population) and the ED50 (the dose therapeutically effective in 50% of the population). The dose ratio between toxic and therapeutic effects is the therapeutic index and it can be expressed as the ratio LD50/ED50. Compounds that exhibit high therapeutic indices are preferred.

[0728] The data obtained from cell culture assays and animal studies can be used in formulating a range of dosage for use in humans. The dosage of compositions featured herein in the invention lies generally within a range of circulating concentrations that include the ED50 with little or no toxicity. The dosage can vary within this range depending upon the dosage form employed and the route of administration utilized. For any compound used in the methods featured in the invention, the therapeutically effective dose can be estimated initially from cell culture assays. A dose can be formulated in animal models to achieve a circulating plasma concentration range of the compound or, when appropriate, of the polypeptide product of a target sequence (e.g., achieving a decreased concentration of the polypeptide) that includes the IC₅₀ (i.e., the concentration of the test compound which achieves a half-maximal inhibition of symptoms) as determined in cell culture. Such information can be used to more accurately determine useful doses in humans. Levels in plasma can be measured, for example, by high performance liquid chromatography.

[0729] In addition to their administration, as discussed above, the iRNAs featured in the invention can be administered in combination with other known agents effective in treatment of pathological processes mediated by CFB, C3, and/or C9 expression. In any event, the administering physician can adjust the amount and timing of iRNA administration on the basis of results observed using standard measures of efficacy known in the art or described herein.

### VII. Methods For Inhibiting Complement Component Expression

[0730] The present invention provides methods of inhibiting expression of a complement component as described herein. In one aspect, the present invention provides methods of inhibiting expression of CFB in a cell. The methods include contacting a cell with an RNAi agent, e.g., a double stranded RNAi agent, in an amount effective to inhibit expression of the CFB in the cell, thereby inhibiting expression of the CFB in the cell.

[0731] The present invention also provides methods of inhibiting expression of C3 in a cell. The methods include contacting a cell with an RNAi agent, e.g., a double stranded RNAi agent, in an amount effective to inhibit expression of the C3 in the cell, thereby inhibiting expression of the C3 in the cell.

[0732] In addition, the present invention provides methods of inhibiting expression of C9 in a cell. The methods include contacting a cell with an RNAi agent, e.g., a double stranded RNAi agent, in an amount effective to inhibit expression of the C9 in the cell, thereby inhibiting expression of the C9 in the cell.

[0733] Contacting of a cell with a double stranded RNAi agent may be done in vitro or in vivo. Contacting a cell in vivo with the RNAi agent includes contacting a cell or group of cells within a subject, e.g., a human subject, with the RNAi agent. Combinations of in vitro and in vivo methods of contacting are also possible. Contacting may be direct or indirect, as discussed above. Furthermore, contacting a cell may be accomplished via a targeting ligand, including any ligand described herein or known in the art. In preferred embodiments, the targeting ligand is a carbohydrate moiety, e.g., a GalNAc₃ ligand, or any other ligand that directs the RNAi agent to a site of interest, e.g., the liver of a subject.

[0734] The term “inhibiting,” as used herein, is used interchangeably with “reducing,” “silencing,” “downregulating” and other similar terms, and includes any level of inhibition.

[0735] The phrase “inhibiting expression of a CFB” is intended to refer to inhibition of expression of any CFB gene (such as, e.g., a mouse CFB gene, a rat CFB gene, a monkey CFB gene, or a human CFB gene) as well as variants or mutants of a CFB gene. Thus, the CFB gene may be a wild-type CFB gene, a mutant CFB gene, or a transgenic CFB gene in the context of a genetically manipulated cell, group of cells, or organism.

[0736] “Inhibiting expression of a CFB gene” includes any level of inhibition of a CFB gene, e.g., at least partial suppression of the expression of a CFB gene. The expression of the CFB gene may be assessed based on the level, or the change in the level, of any variable associated with CFB gene expression, e.g., CFB mRNA level, CFB protein level, or, for example, CHso activity as a measure of total hemolytic complement, AHso to measure the hemolytic activity of the alternate pathway of complement, and/or lactate dehydrogenase (LDH) levels as a measure of intravascular hemolysis, and/or hemoglobin levels. Levels of C3, C9, C5, C5a, C5b, and soluble C5b-9 complex may also be measured to assess CFB expression. Inhibition may be assessed by a decrease in an absolute or relative level of one or more of these variables compared with a control level. The control level may be any type of control level that is utilized in the art, e.g., a pre-dose baseline level, or a level determined from a similar subject, cell, or sample that is untreated or treated with a control (such as, e.g., buffer only control or inactive agent control).

[0737] The phrase “inhibiting expression of a C3” is intended to refer to inhibition of expression of any C3 gene (such as, e.g., a mouse C3 gene, a rat C3 gene, a monkey C3 gene, or a human C3 gene) as well as variants or mutants of a C3 gene. Thus, the C3 gene may be a wild-type C3 gene, a mutant C3 gene, or a transgenic C3 gene in the context of a genetically manipulated cell, group of cells, or organism.

[0738] “Inhibiting expression of a C3 gene” includes any level of inhibition of a C3 gene, e.g., at least partial suppression of the expression of a C3 gene. The expression of the C3 gene may be assessed based on the level, or the change in the level, of any variable associated with C3 gene expression, e.g., C3 mRNA level, C3 protein level, or, for example, CH₅₀ activity as a measure of total hemolytic complement, AH₅₀ to measure the hemolytic activity of the alternate pathway of complement, and/or lactate dehydrogenase (LDH) levels as a measure of intravascular hemolysis, and/or hemoglobin levels. Levels of CFB, C9, C5, C5a, C5b, and soluble C5b-9 complex may also be measured to assess C3 expression. Inhibition may be assessed by a decrease in an absolute or relative level of one or more of these variables compared with a control level. The control level may be any type of control level that is utilized in the art, e.g., a pre-dose baseline level, or a level determined from a similar subject, cell, or sample that is untreated or treated with a control (such as, e.g., buffer only control or inactive agent control).

[0739] The phrase “inhibiting expression of a C9” is intended to refer to inhibition of expression of any C9 gene (such as, e.g., a mouse C9 gene, a rat C9 gene, a monkey C9 gene, or a human C9 gene) as well as variants or mutants of a C9 gene. Thus, the C9 gene may be a wild-type C9 gene, a mutant C9 gene, or a transgenic C9 gene in the context of a genetically manipulated cell, group of cells, or organism.

[0740] “Inhibiting expression of a C9 gene” includes any level of inhibition of a C9 gene, e.g., at least partial suppression of the expression of a C9 gene. The expression of the C9 gene may be assessed based on the level, or the change in the level, of any variable associated with C9 gene expression, e.g., C9 mRNA level, C9 protein level, or, for example, CH₅₀ activity as a measure of total hemolytic complement, AH₅₀ to measure the hemolytic activity of the alternate pathway of complement, and/or lactate dehydrogenase (LDH) levels as a measure of intravascular hemolysis, and/or hemoglobin levels. Levels of CFB, C3, C5, C5a, C5b, and soluble C5b-9 complex may also be measured to assess C9 expression. Inhibition may be assessed by a decrease in an absolute or relative level of one or more of these variables compared with a control level. The control level may be any type of control level that is utilized in the art, e.g., a pre-dose baseline level, or a level determined from a similar subject, cell, or sample that is untreated or treated with a control (such as, e.g., buffer only control or inactive agent control).

[0741] In some embodiments of the methods of the invention, expression of a target gene, e.g., CFB, C3, or C9 gene, is inhibited by at least about 5%, at least about 10%, at least about 15%, at least about 20%, at least about 25%, at least about 30%, at least about 35%, at least about 40%, at least about 45%, at least about 50%, at least about 55%, at least about 60%, at least about 65%, at least about 70%, at least about 75%, at least about 80%, at least about 85%, at least about 90%, at least about 91%, at least about 92%, at least about 93%, at least about 94%, at least about 95%, at least about 96%, at least about 97%, at least about 98%, or at least about 99%.

[0742] Inhibition of the expression of the target gene, e.g., a CFB, C3, or C9, gene may be manifested by a reduction of the amount of mRNA expressed by a first cell or group of cells (such cells may be present, for example, in a sample derived from a subject) in which a target gene is transcribed and which has or have been treated (e.g., by contacting the cell or cells with an RNAi agent of the invention, or by administering an RNAi agent of the invention to a subject in which the cells are or were present) such that the expression of a target gene is inhibited, as compared to a second cell or group of cells substantially identical to the first cell or group of cells but which has not or have not been so treated (control cell(s)). In preferred embodiments, the inhibition is assessed by expressing the level of mRNA in treated cells as a percentage of the level of mRNA in control cells, using the following formula:

$$\\ \frac{( mRNA in control cells ) - ( mRNA in treated cells )}{( mRNA in control cells )} \cdot 100 \%$$

[0743] Inhibition of the expression of a complement component protein may be manifested by a reduction in the level of the protein that is expressed by a cell or group of cells (e.g., the level of protein expressed in a sample derived from a subject). As explained above for the assessment of mRNA suppression, the inhibition of protein expression levels in a treated cell or group of cells may similarly be expressed as a percentage of the level of protein in a control cell or group of cells.

[0744] A control cell or group of cells that may be used to assess the inhibition of the expression of a target gene includes a cell or group of cells that has not yet been contacted with an RNAi agent of the invention. For example, the control cell or group of cells may be derived from an individual subject (e.g., a human or animal subject) prior to treatment of the subject with an RNAi agent.

[0745] The level of CFB, C3, or C9 mRNA that is expressed by a cell or group of cells may be determined using any method known in the art for assessing mRNA expression. In one embodiment, the level of expression of CFB, C3, and/or C9 in a sample is determined by detecting a transcribed polynucleotide, or portion thereof, e.g., mRNA of the CFB, C3, and/or C9 gene. RNA may be extracted from cells using RNA extraction techniques including, for example, using acid phenol/guanidine isothiocyanate extraction (RNAzol B; Biogenesis), RNeasy RNA preparation kits (Qiagen) or PAXgene (PreAnalytix, Switzerland). Typical assay formats utilizing ribonucleic acid hybridization include nuclear run-on assays, RT-PCR, RNase protection assays (Melton et al., Nuc. Acids Res. 12:7035), Northern blotting, in situ hybridization, and microarray analysis.

[0746] In one embodiment, the level of expression of CFB, C3, and/or C9 is determined using a nucleic acid probe. The term “probe”, as used herein, refers to any molecule that is capable of selectively binding to a specific CFB, C3, or C9. Probes can be synthesized by one of skill in the art, or derived from appropriate biological preparations. Probes may be specifically designed to be labeled. Examples of molecules that can be utilized as probes include, but are not limited to, RNA, DNA, proteins, antibodies, and organic molecules.

[0747] Isolated mRNA can be used in hybridization or amplification assays that include, but are not limited to, Southern or Northern analyses, polymerase chain reaction (PCR) analyses and probe arrays. One method for the determination of mRNA levels involves contacting the isolated mRNA with a nucleic acid molecule (probe) that can hybridize, e.g., specifically hybridize, to CFB, C3, or C9 mRNA. In one embodiment, the mRNA is immobilized on a solid surface and contacted with a probe, for example by running the isolated mRNA on an agarose gel and transferring the mRNA from the gel to a membrane, such as nitrocellulose. In an alternative embodiment, the probe(s) are immobilized on a solid surface and the mRNA is contacted with the probe(s), for example, in an Affymetrix gene chip array. A skilled artisan can readily adapt known mRNA detection methods for use in determining the level of CFB, C3, and/or C9 mRNA.

[0748] An alternative method for determining the level of expression of CFB, C3, and/or C9 in a sample involves the process of nucleic acid amplification and/or reverse transcriptase (to prepare cDNA) of for example mRNA in the sample, e.g., by RT-PCR (the experimental embodiment set forth in Mullis, 1987, U.S. Pat. No. 4,683,202), ligase chain reaction (Barany (1991) Proc. Natl. Acad. Sci. USA 88:189-193), self sustained sequence replication (Guatelli et al. (1990) Proc. Natl. Acad. Sci. USA 87:1874-1878), transcriptional amplification system (Kwoh et al. (1989) Proc. Natl. Acad. Sci. USA 86:1173-1177), Q-Beta Replicase (Lizardi et al. (1988) Bio/Technology 6:1197), rolling circle replication (Lizardi et al., U.S. Pat. No. 5,854,033) or any other nucleic acid amplification method, followed by the detection of the amplified molecules using techniques well known to those of skill in the art. These detection schemes are especially useful for the detection of nucleic acid molecules if such molecules are present in very low numbers. In particular aspects of the invention, the level of expression of CFB, C3, and/or C9 is determined by quantitative fluorogenic RT-PCR (i.e., the TaqMan™ System).

[0749] The expression levels of CFB, C3, and/or C9 mRNA may be monitored using a membrane blot (such as used in hybridization analysis such as Northern, Southern, dot, and the like), or microwells, sample tubes, gels, beads or fibers (or any solid support comprising bound nucleic acids). See U.S. Pat. Nos. 5,770,722, 5,874,219, 5,744,305, 5,677,195 and 5,445,934, which are incorporated herein by reference. The determination of PCSK9 expression level may also comprise using nucleic acid probes in solution.

[0750] In preferred embodiments, the level of mRNA expression is assessed using branched DNA (bDNA) assays or real time PCR (qPCR). The use of these methods is described and exemplified in the Examples presented herein.

[0751] The level of CFB, C3, and/or C9 protein expression may be determined using any method known in the art for the measurement of protein levels. Such methods include, for example, electrophoresis, capillary electrophoresis, high performance liquid chromatography (HPLC), thin layer chromatography (TLC), hyperdiffusion chromatography, fluid or gel precipitin reactions, absorption spectroscopy, a colorimetric assays, spectrophotometric assays, flow cytometry, immunodiffusion (single or double), immunoelectrophoresis, Western blotting, radioimmunoassay (RIA), enzyme-linked immunosorbent assays (ELISAs), immunofluorescent assays, electrochemiluminescence assays, and the like.

[0752] The term “sample” as used herein refers to a collection of similar fluids, cells, or tissues isolated from a subject, as well as fluids, cells, or tissues present within a subject. Examples of biological fluids include blood, serum and serosal fluids, plasma, lymph, urine, cerebrospinal fluid, saliva, ocular fluids, and the like. Tissue samples may include samples from tissues, organs or localized regions. For example, samples may be derived from particular organs, parts of organs, or fluids or cells within those organs. In certain embodiments, samples may be derived from the liver (e.g., whole liver or certain segments of liver or certain types of cells in the liver, such as, e.g., hepatocytes). In preferred embodiments, a “sample derived from a subject” refers to blood or plasma drawn from the subject. In further embodiments, a “sample derived from a subject” refers to liver tissue derived from the subject.

[0753] In some embodiments of the methods of the invention, the RNAi agent is administered to a subject such that the RNAi agent is delivered to a specific site within the subject. The inhibition of expression of CFB, C3, and/or C9 may be assessed using measurements of the level or change in the level of CFB, C3, and/or C9 mRNA and/or CFB, C3, and/or C9 protein in a sample derived from fluid or tissue from the specific site within the subject. In preferred embodiments, the site is sthe liver. The site may also be a subsection or subgroup of cells from any one of the aforementioned sites. The site may also include cells that express a particular type of receptor.

### VIII. Methods for Treating or Preventing a Complement Component-Associated Disease

[0754] The present invention provides therapeutic and prophylactic methods which include administering to a subject having a complement component-associated disease, as described herein, e.g., PNH or aHUS, an iRNA agent, pharmaceutical compositions comprising an iRNA agent, or vector comprising an iRNA of the invention.

[0755] It is to be understood, that any of the methods of the invention may be practiced with a single iRNA agent of the invention or a combination of iRNA agents of the invention. For example, in some aspects, the methods (and uses) of the invention include using an iRNA agent targeting a CFB gene and an iRNA agent targeting a C3 gene. In some aspects, the methods (and uses) of the invention include using an iRNA agent targeting a CFB gene and an iRNA agent targeting a C9 gene. In some aspects, the methods (and uses) of the invention include using an iRNA agent targeting a C3 gene and an iRNA agent targeting a C9 gene. In other aspects, the methods (and uses) of the invention include using an iRNA agent targeting a CFB gene, an iRNA agent targeting a C3 gene, and an iRNA agent targeting a C9 gene. In some aspects of the invention, the methods which include either a single iRNA agent of the invention or a combination of iRNA agents, further include administering to the subject one or more additional therapeutic agents such as, for example, Soliris® (as further described below).

[0756] In one aspect, the present invention provides methods of treating a subject having a disorder that would benefit from reduction in CFB expression, e.g., “a complement component-associated disease,” e.g., PNH, aHUS, or rheumatoid arthritis. The treatment methods (and uses) of the invention include administering to the subject, e.g., a human, a therapeutically effective amount of an iRNA agent targeting a CFB gene or a pharmaceutical composition comprising an iRNA agent targeting a CFB gene, thereby treating the subject having a disorder that would benefit from reduction in CFB expression.

[0757] In another aspect, the present invention provides methods of treating a subject having a disorder that would benefit from reduction in C3 expression, e.g., “a complement component-associated disease,” e.g., PNH, aHUS, or rheumatoid arthritis. The treatment methods (and uses) of the invention include administering to the subject, e.g., a human, a therapeutically effective amount of an iRNA agent targeting a C3 gene or a pharmaceutical composition comprising an iRNA agent targeting a C3 gene, thereby treating the subject having a disorder that would benefit from reduction in C3 expression.

[0758] In a further aspect, the present invention provides methods of treating a subject having a disorder that would benefit from reduction in C9 expression, e.g., “a complement component-associated disease,” e.g., PNH, aHUS, or rheumatoid arthritis. The treatment methods (and uses) of the invention include administering to the subject, e.g., a human, a therapeutically effective amount of an iRNA agent targeting a C9 gene or a pharmaceutical composition comprising an iRNA agent targeting a C9 gene, thereby treating the subject having a disorder that would benefit from reduction in C9 expression.

[0759] In one aspect, the invention provides methods of preventing at least one symptom in a subject having a disorder that would benefit from reduction in CFB expression, e.g., a complement component-associated disease, e.g., PNH, aHUS, or rheumatoid arthritis. The methods include administering to the subject a therapeutically effective amount of the iRNA agent, e.g., dsRNA, or vector of the invention, thereby preventing at least one symptom in the subject having a disorder that would benefit from reduction in CFB expression. For example, the invention provides methods for preventing hemolysis in a subject suffering from a disorder that would benefit from reduction in CFB expression, e.g., a complement component-associated disease, e.g., PNH, aHUS, or rheumatoid arthritis.

[0760] In one aspect, the invention provides methods of preventing at least one symptom in a subject having a disorder that would benefit from reduction in C3 expression, e.g., a complement component-associated disease, e.g., PNH, aHUS, or rheumatoid arthritis. The methods include administering to the subject a therapeutically effective amount of the iRNA agent, e.g., dsRNA, or vector of the invention, thereby preventing at least one symptom in the subject having a disorder that would benefit from reduction in C3 expression. For example, the invention provides methods for preventing hemolysis in a subject suffering from a disorder that would benefit from reduction in C3 expression, e.g., a complement component-associated disease, e.g., PNH, aHUS, or rheumatoid arthritis.

[0761] In one aspect, the invention provides methods of preventing at least one symptom in a subject having a disorder that would benefit from reduction in C9 expression, e.g., a complement component-associated disease, e.g., PNH, aHUS, or rheumatoid arthritis. The methods include administering to the subject a therapeutically effective amount of the iRNA agent, e.g., dsRNA, or vector of the invention, thereby preventing at least one symptom in the subject having a disorder that would benefit from reduction in C9 expression. For example, the invention provides methods for preventing hemolysis in a subject suffering from a disorder that would benefit from reduction in C9 expression, e.g., a complement component-associated disease, e.g., PNH, aHUS, or rheumatoid arthritis.

[0762] In another aspect, the present invention provides uses of a therapeutically effective amount of an iRNA agent of the invention for treating a subject, e.g., a subject that would benefit from a reduction and/or inhibition of CFB expression.

[0763] In a further aspect, the present invention provides uses of a therapeutically effective amount of an iRNA agent of the invention for treating a subject, e.g., a subject that would benefit from a reduction and/or inhibition of C3 expression.

[0764] In yet another aspect, the present invention provides uses of a therapeutically effective amount of an iRNA agent of the invention for treating a subject, e.g., a subject that would benefit from a reduction and/or inhibition of C9 expression.

[0765] In yet another aspect, the present invention provides use of an iRNA agent, e.g., a dsRNA, of the invention targeting a CFB gene or a pharmaceutical composition comprising an iRNA agent targeting a CFB gene in the manufacture of a medicament for treating a subject, e.g., a subject that would benefit from a reduction and/or inhibition of CFB expression, such as a subject having a disorder that would benefit from reduction in CFB expression, e.g., a complement component-associated disease, e.g., PNH, aHUS, or rheumatoid arthritis.

[0766] In a further aspect, the present invention provides use of an iRNA agent, e.g., a dsRNA, of the invention targeting a C3 gene or a pharmaceutical composition comprising an iRNA agent targeting a C3 gene in the manufacture of a medicament for treating a subject, e.g., a subject that would benefit from a reduction and/or inhibition of C3 expression, such as a subject having a disorder that would benefit from reduction in C3 expression, e.g., a complement component-associated disease, e.g., PNH, aHUS, or rheumatoid arthritis.

[0767] In yet a further aspect, the present invention provides use of an iRNA agent, e.g., a dsRNA, of the invention targeting a C9 gene or a pharmaceutical composition comprising an iRNA agent targeting a C9 gene in the manufacture of a medicament for treating a subject, e.g., a subject that would benefit from a reduction and/or inhibition of C9 expression, such as a subject having a disorder that would benefit from reduction in C9 expression, e.g., a complement component-associated disease, e.g., PNH, aHUS, or rheumatoid arthritis.

[0768] In another aspect, the invention provides uses of an iRNA, e.g., a dsRNA, of the invention for preventing at least one symptom in a subject suffering from a disorder that would benefit from a reduction and/or inhibition of CFB expression, such as a complement component-associated disease, e.g., PNH, aHUS, or rheumatoid arthritis.

[0769] In another aspect, the invention provides uses of an iRNA, e.g., a dsRNA, of the invention for preventing at least one symptom in a subject suffering from a disorder that would benefit from a reduction and/or inhibition of C3 expression, such as a complement component-associated disease, e.g., PNH, aHUS, or rheumatoid arthritis.

[0770] In another aspect, the invention provides uses of an iRNA, e.g., a dsRNA, of the invention for preventing at least one symptom in a subject suffering from a disorder that would benefit from a reduction and/or inhibition of C9 expression, such as a complement component-associated disease, e.g., PNH, aHUS, or rheumatoid arthritis.

[0771] In a further aspect, the present invention provides uses of an iRNA agent of the invention in the manufacture of a medicament for preventing at least one symptom in a subject suffering from a disorder that would benefit from a reduction and/or inhibition of CFB expression, such as a a complement component-associated disease, e.g., PNH, aHUS, or rheumatoid arthritis.

[0772] In a further aspect, the present invention provides uses of an iRNA agent of the invention in the manufacture of a medicament for preventing at least one symptom in a subject suffering from a disorder that would benefit from a reduction and/or inhibition of C3 expression, such as a a complement component-associated disease, e.g., PNH, aHUS, or rheumatoid arthritis.

[0773] In a further aspect, the present invention provides uses of an iRNA agent of the invention in the manufacture of a medicament for preventing at least one symptom in a subject suffering from a disorder that would benefit from a reduction and/or inhibition of C9 expression, such as a a complement component-associated disease, e.g., PNH, aHUS, or rheumatoid arthritis.

[0774] In some aspects of the invention, the methods which include either a single iRNA agent of the invention or a combination of iRNA agents, further include administering to the subject one or more additional therapeutic agents.

[0775] In some aspects, the additional therapeutic agent is an iRNA agent targeting a C5 gene, such as described in U.S. Provisional Patent Application No. 61/782,531, filed on Mar. 14, 2013, U.S. Provisional Patent Application No. 61/837,3991, filed on Jun. 20, 2013, and U.S. Provisional Patent Application No. 61/904,579, filed on Nov. 15, 2013, the entire contents of each of which are hereby incorporated herein by reference.

[0776] In other aspects, the additional therapeutic agent is an anti-complement component C5 antibody, or antigen-binding fragment thereof (e.g., eculizumab). Eculizumab is a humanized monoclonal IgG2/4, kappa light chain antibody that specifically binds complement component C5 with high affinity and inhibits cleavage of C5 to C5a and C5b, thereby inhibiting the generation of the terminal complement complex C5b-9. Eculizumab is described in U.S. Pat. No. 6,355,245, the entire contents of which are incorporated herein by reference.

[0777] In yet other aspects, the additional therapeutic is a C3 peptide inhibitor, or analog thereof. In one embodiment, the C3 peptide inhibitor is compstatin. Compstatin is a cyclic tridecapeptide with potent and selective C3 inhibitory activity. Compstatin, and its analogs, are described in U.S. Pat. Nos. 7,888,323, 7,989,589, and 8,442,776, in U.S. Patent Publication No. 2012/0178694 and 2013/0053302, and in PCT Publication Nos. WO 2012/174055, WO 2012/2178083, WO 2013/036778, the entire contents of each of which are incorporated herein by reference.

[0778] Accordingly, in one aspect, the present invention provides methods of treating a subject having a disorder that would benefit from reduction in CFB expression, e.g., a complement component-associated disease, e.g., PNH, aHUS, or rheumatoid arthritis, which include administering to the subject, e.g., a human, a therapeutically effective amount of an iRNA agent targeting a CFB gene or a pharmaceutical composition comprising an iRNA agent targeting a CFB gene, and an additional therapeutic agent, such as an anti-complement component C5 antibody, or antigen-binding fragment thereof (e.g., eculizumab), an iRNA agent targeting complement component C5, and/or a C3 peptide inhibitor (e.g., compstatin), thereby treating the subject having a disorder that would benefit from reduction in CFB expression.

[0779] In another aspect, the present invention provides methods of treating a subject having a disorder that would benefit from reduction in C3 expression, e.g., a complement component-associated disease, e.g., PNH, aHUS, or rheumatoid arthritis, which include administering to the subject, e.g., a human, a therapeutically effective amount of an iRNA agent targeting a C3 gene or a pharmaceutical composition comprising an iRNA agent targeting a C3 gene, and an additional therapeutic agent, such as an anti-complement component C5 antibody, or antigen-binding fragment thereof (e.g., eculizumab), an iRNA agent targeting complement component C5, and/or a C3 peptide inhibitor (e.g., compstatin), thereby treating the subject having a disorder that would benefit from reduction in C3 expression.

[0780] In another aspect, the present invention provides methods of treating a subject having a disorder that would benefit from reduction in C9 expression, e.g., a complement component-associated disease, e.g., PNH, aHUS, or rheumatoid arthritis, which include administering to the subject, e.g., a human, a therapeutically effective amount of an iRNA agent targeting a C9 gene or a pharmaceutical composition comprising an iRNA agent targeting a C9 gene, and an additional therapeutic agent, such as an anti-complement component C5 antibody, or antigen-binding fragment thereof (e.g., eculizumab), an iRNA agent targeting complement component C5, and/or a C3 peptide inhibitor (e.g., compstatin), thereby treating the subject having a disorder that would benefit from reduction in C9 expression.

[0781] In another aspect, the invention provides methods of preventing at least one symptom in a subject having a disorder that would benefit from reduction in CFB expression, e.g., a complement component-associated disease, e.g., PNH, aHUS, or rheumatoid arthritis. The methods include administering to the subject a therapeutically effective amount of the iRNA agent, e.g., dsRNA, or vector of the invention, and an additional therapeutic agent, such as an anti-complement component C5 antibody, or antigen-binding fragment thereof (e.g., eculizumab), an iRNA agent targeting complement component C5, and/or a C3 peptide inhibitor (e.g., compstatin), thereby preventing at least one symptom in the subject having a disorder that would benefit from reduction in CFB expression.

[0782] In another aspect, the invention provides methods of preventing at least one symptom in a subject having a disorder that would benefit from reduction in C3 expression, e.g., a complement component-associated disease, e.g., PNH, aHUS, or rheumatoid arthritis. The methods include administering to the subject a therapeutically effective amount of the iRNA agent, e.g., dsRNA, or vector of the invention, and an additional therapeutic agent, such as an anti-complement component C5 antibody, or antigen-binding fragment thereof (e.g., eculizumab), an iRNA agent targeting complement component C5, and/or a C3 peptide inhibitor (e.g., compstatin), thereby preventing at least one symptom in the subject having a disorder that would benefit from reduction in C3 expression.

[0783] In another aspect, the invention provides methods of preventing at least one symptom in a subject having a disorder that would benefit from reduction in C9 expression, e.g., a complement component-associated disease, e.g., PNH, aHUS, or rheumatoid arthritis. The methods include administering to the subject a therapeutically effective amount of the iRNA agent, e.g., dsRNA, or vector of the invention, and an additional therapeutic agent, such as an anti-complement component C5 antibody, or antigen-binding fragment thereof (e.g., eculizumab), an iRNA agent targeting complement component C5, and/or a C3 peptide inhibitor (e.g., compstatin), thereby preventing at least one symptom in the subject having a disorder that would benefit from reduction in C9 expression.

[0784] In another aspect, the present invention provides uses of a therapeutically effective amount of an iRNA agent of the invention and an additional therapeutic agent, such as an anti-complement component C5 antibody, or antigen-binding fragment thereof (e.g., eculizumab), an iRNA agent targeting complement component C5, and/or a C3 peptide nhibitor (e.g., comstatin), for treating a subject, e.g., a subject that would benefit from a reduction and/or inhibition of CFB expression.

[0785] In another aspect, the present invention provides uses of a therapeutically effective amount of an iRNA agent of the invention and an additional therapeutic agent, such as an anti-complement component C5 antibody, or antigen-binding fragment thereof (e.g., eculizumab), an iRNA agent targeting complement component C5, and/or a C3 peptide inhibitor (e.g., compstatin), for treating a subject, e.g., a subject that would benefit from a reduction and/or inhibition of C3 expression.

[0786] In another aspect, the present invention provides uses of a therapeutically effective amount of an iRNA agent of the invention and an additional therapeutic agent, such as an anti-complement component C5 antibody, or antigen-binding fragment thereof (e.g., eculizumab), an iRNA agent targeting complement component C5, and/or a C3 peptide inhibitor (e.g., compstatin), for treating a subject, e.g., a subject that would benefit from a reduction and/or inhibition of C9 expression.

[0787] In another aspect, the present invention provides uses of an iRNA agent, e.g., a dsRNA, of the invention targeting a CFB gene or a pharmaceutical composition comprising an iRNA agent targeting a CFB gene in the manufacture of a medicament for use in combination with an additional therapeutic agent, such as an anti-complement component CFB antibody, or antigen-binding fragment thereof (e.g., eculizumab), an iRNA agent targeting complement component C5, and/or a C3 peptide inhibitor (e.g., compstatin), for treating a subject, e.g., a subject that would benefit from a reduction and/or inhibition of CFB expression, e.g., a complement component-associated disease, e.g., PNH, aHUS, or rheumatoid arthritis.

[0788] In another aspect, the present invention provides uses of an iRNA agent, e.g., a dsRNA, of the invention targeting a C3 gene or a pharmaceutical composition comprising an iRNA agent targeting a C3 gene in the manufacture of a medicament for use in combination with an additional therapeutic agent, such as an anti-complement component C3 antibody, or antigen-binding fragment thereof (e.g., eculizumab), an iRNA agent targeting complement component C5, and/or a C3 peptide inhibitor (e.g., compstatin), for treating a subject, e.g., a subject that would benefit from a reduction and/or inhibition of C3 expression, e.g., a complement component-associated disease, e.g., PNH, aHUS, or rheumatoid arthritis.

[0789] In another aspect, the present invention provides uses of an iRNA agent, e.g., a dsRNA, of the invention targeting a C9 gene or a pharmaceutical composition comprising an iRNA agent targeting a C9 gene in the manufacture of a medicament for use in combination with an additional therapeutic agent, such as an anti-complement component C9 antibody, or antigen-binding fragment thereof (e.g., eculizumab), an iRNA agent targeting complement component C5, and/or a C3 peptide inhibitor (e.g., compstatin), for treating a subject, e.g., a subject that would benefit from a reduction and/or inhibition of C9 expression, e.g., a complement component-associated disease, e.g., PNH, aHUS, or rheumatoid arthritis.

[0790] In yet another aspect, the invention provides uses of an iRNA agent, e.g., a dsRNA, of the invention, and an additional therapeutic agent, such as an anti-complement component C5 antibody, or antigen-binding fragment thereof (e.g., eculizumab), an iRNA agent targeting complement component C5, and/or a C3 peptide inhibitor (e.g., compstatin), for preventing at least one symptom in a subject suffering from a disorder that would benefit from a reduction and/or inhibition of CFB expression, such as a complement component-associated disease, e.g., PNH, aHUS, or rheumatoid arthritis.

[0791] In yet another aspect, the invention provides uses of an iRNA agent, e.g., a dsRNA, of the invention, and an additional therapeutic agent, such as an anti-complement component C5 antibody, or antigen-binding fragment thereof (e.g., eculizumab), an iRNA agent targeting complement component C5, and/or a C3 peptide inhibitor (e.g., compstatin), for preventing at least one symptom in a subject suffering from a disorder that would benefit from a reduction and/or inhibition of C3 expression, such as a complement component-associated disease, e.g., PNH, aHUS, or rheumatoid arthritis.

[0792] In yet another aspect, the invention provides uses of an iRNA agent, e.g., a dsRNA, of the invention, and an additional therapeutic agent, such as an anti-complement component C5 antibody, or antigen-binding fragment thereof (e.g., eculizumab), an iRNA agent targeting complement component C5, and/or a C3 peptide inhibitor (e.g., compstatin), for preventing at least one symptom in a subject suffering from a disorder that would benefit from a reduction and/or inhibition of C9 expression, such as a complement component-associated disease, e.g., PNH, aHUS, or rheumatoid arthritis.

[0793] In a further aspect, the present invention provides uses of an iRNA agent of the invention in the manufacture of a medicament for use in combination with an additional therapeutic agent, such as an anti-complement component C5 antibody, or antigen-binding fragment thereof (e.g., eculizumab), an iRNA agent targeting complement component C5, and/or a C3 peptide inhibitor (e.g., compstatin), for preventing at least one symptom in a subject suffering from a disorder that would benefit from a reduction and/or inhibition of CFB expression, such as a a complement component-associated disease, e.g., PNH, aHUS, or rheumatoid arthritis.

[0794] In a further aspect, the present invention provides uses of an iRNA agent of the invention in the manufacture of a medicament for use in combination with an additional therapeutic agent, such as an anti-complement component C5 antibody, or antigen-binding fragment thereof (e.g., eculizumab), an iRNA agent targeting complement component C5, and/or a C3 peptide inhibitor (e.g., compstatin), for preventing at least one symptom in a subject suffering from a disorder that would benefit from a reduction and/or inhibition of C3 expression, such as a a complement component-associated disease, e.g., PNH, aHUS, or rheumatoid arthritis.

[0795] In a further aspect, the present invention provides uses of an iRNA agent of the invention in the manufacture of a medicament for use in combination with an additional therapeutic agent, such as an anti-complement component C5 antibody, or antigen-binding fragment thereof (e.g., eculizumab), an iRNA agent targeting complement component C5, and/or a C3 peptide inhibitor (e.g., compstatin), for preventing at least one symptom in a subject suffering from a disorder that would benefit from a reduction and/or inhibition of C9 expression, such as a a complement component-associated disease, e.g., PNH, aHUS, or rheumatoid arthritis.

[0796] In one embodiment, an iRNA agent targeting CFB, C3, or C9 is administered to a subject having a complement component-associated disease as described herein such that CFB, C3, and/or C9 levels, e.g., in a cell, tissue, blood, urine or other tissue or fluid of the subject are reduced by at least about 10%, 11%, 12%, 13%, 14%, 15%, 16%, 17%, 18%, 19%, 20%, 21%, 22%, 23%, 24%, 25%, 26%, 27%, 28%, 29%, 30%, 31%, 32%, 33%, 34%, 35%, 36%, 37%, 38%, 39%, 40%, 41%, 42%, 43%, 44%, 45%, 46%, 47%, 48%, 49%, 50%, 51%, 52%, 53%, 54%, 55%, 56%, 57%, 58%, 59%, 60%, 61%, 62%, 62%, 64%, 65%, 66%, 67%, 68%, 69%, 70%, 71%, 72%, 73%, 74%, 75%, 76%, 77%, 78%, 79%, 80%, 81%, 82%, 83%, 84%, 85%, 86%, 87%, 88%, 89%, 90%, 91%, 92%, 93%, 94%, 95%, 96%, 97%, 98%, or at least about 99% or more and, subsequently, an additional therapeutic is administered to the subject.

[0797] The additional therapeutic may be an anti-complement component C5 antibody, or antigen-binding fragment or derivative thereof. In one embodiment, the anti-complement component C5 antibody is eculizumab (SOLIRIS®), or antigen-binding fragment or derivative thereof.

[0798] The methods of the invention comprising administration of an iRNA agent of the invention and eculizumab to a subject may further comprise administration of a meningococcal vaccine to the subject.

[0799] The additional therapeutic, e.g., eculizumab and/or a meningococcal vaccine, may be administered to the subject at the same time as the iRNA agent targeting CFB, C3, and/or C9 (and/or C5) or at a different time.

[0800] Moreover, the additional therapeutic, e.g., eculizumab, may be administered to the subject in the same formulation as the iRNA agent targeting CFB, C3, and/or C9 (and/or C5) or in a different formulation as the iRNA agent targeting CFB, C3, and/or C9 (and/or C5).

[0801] Eculizumab dosage regimens are described in, for example, the product insert for eculizumab (SOLIRIS®) and in U.S. Patent Application No. 2012/0225056, the entire contents of each of which are incorporated herein by reference. In exemplary methods of the invention for treating a complement component-associated disease, e.g., PNH, aHUS, or rheumatoid arthritis, an iRNA agent targeting, e.g., CFB, C3, or C9, is administered (e.g., subcutaneously) to the subject first, such that the C5 levels in the subject are reduced (e.g., by at least about 20%, 21%, 22%, 23%, 24%, 25%, 26%, 27%, 28%, 29%, 30%, 31%, 32%, 33%, 34%, 35%, 36%, 37%, 38%, 39%, 40%, 41%, 42%, 43%, 44%, 45%, 46%, 47%, 48%, 49%, 50%, 51%, 52%, 53%, 54%, 55%, 56%, 57%, 58%, 59%, 60%, 61%, 62%, 62%, 64%, 65%, 66%, 67%, 68%, 69%, 70%, 71%, 72%, 73%, 74%, 75%, 76%, 77%, 78%, 79%, 80%, 81%, 82%, 83%, 84%, 85%, 86%, 87%, 88%, 89%, 90%, 91%, 92%, 93%, 94%, 95%, 96%, 97%, 98%, or at least about 99% or more) and subsequently eculizumab is administered at doses lower than the ones described in the product insert for SOLIRIS®. For example, eculizumab may be administered to the subject weekly at a dose less than about 600 mg for 4 weeks followed by a fifth dose at about one week later of less than about 900 mg, followed by a dose less than about 900 mg about every two weeks thereafter. Eculizumab may also be administered to the subject weekly at a dose less than about 900 mg for 4 weeks followed by a fifth dose at about one week later of less than about 1200 mg, followed by a dose less than about 1200 mg about every two weeks thereafter. If the subject is less than 18 years of age, eculizumab may be administered to the subject weekly at a dose less than about 900 mg for 4 weeks followed by a fifth dose at about one week later of less than about 1200 mg, followed by a dose less than about 1200 mg about every two weeks thereafter; or if the subject is less than 18 years of age, eculizumab may be administered to the subject weekly at a dose less than about 600 mg for 2 weeks followed by a third dose at about one week later of less than about 900 mg, followed by a dose less than about 900 mg about every two weeks thereafter; or if the subject is less than 18 years of age, eculizumab may be administered to the subject weekly at a dose less than about 600 mg for 2 weeks followed by a third dose at about one week later of less than about 600 mg, followed by a dose less than about 600 mg about every two weeks thereafter; or if the subject is less than 18 years of age, eculizumab may be administered to the subject weekly at a dose less than about 600 mg for 1 week followed by a second dose at about one week later of less than about 300 mg, followed by a dose less than about 300 mg about every two weeks thereafter; or if the subject is less than 18 years of age, eculizumab may be administered to the subject weekly at a dose less than about 300 mg for 1 week followed by a second dose at about one week later of less than about 300 mg, followed by a dose less than about 300 mg about every two weeks thereafter. If the subject is receiving plamapheresis or plasma exchange, eculizumab may be administered to the subject at a dose less than about 300 mg (e.g., if the most recent does of eculizumab was about 300 mg) or less than about 600 mg (e.g., if the most recent does of eculizumab was about 600 mg or more). If the subject is receiving plasma infusion, eculizumab may be administered to the subject at a dose less than about 300 mg (e.g., if the most recent does of eculizumab was about 300 mg or more). The lower doses of eculizumab allow for either subcutaneous or intravenous administration of eculizumab.

[0802] In the combination therapies of the present invention comprising eculizumab, eculizumab may be administered to the subject, e.g., subcutaneously, at a dose of about 0.01 mg/kg to about 10 mg/kg, or about 5 mg/kg to about 10 mg/kg, or about 0.5 mg/kg to about 15 mg/kg. For example, eculizumab may be administered to the subject, e.g., subcutaneously, at a dose of 0.5 mg/kg, 1 mg/kg, 1.5 mg/kg, 2 mg/kg, 2.5 mg/kg, 3 mg/kg, 3.5 mg/kg, 4 mg/kg, 4.5 mg/kg, 5 mg/kg, 5.5 mg/kg, 6 mg/kg, 6.5 mg/kg, 7 mg/kg, 7.5 mg/kg, 8 mg/kg, 8.5 mg/kg, 9 mg/kg, 9.5 mg/kg, 10 mg/kg, 10.5 mg/kg, 11 mg/kg, 11.5 mg/kg, 12 mg/kg, 12.5 mg/kg, 13 mg/kg, 13.5 mg/kg, 14 mg/kg, 14.5 mg/kg, or 15 mg/kg.

[0803] The methods and uses of the invention include administering a composition described herein such that expression of the target CFB, C3, and/or C9 (and/or C5) gene is decreased, such as for about 1, 2, 3, 4, 5, 6, 7, 8, 12, 16, 18, 24, 28, 32, 36, 40, 44, 48, 52, 56, 60, 64, 68, 72, 76, or about 80 hours. In one embodiment, expression of the target gene is decreased for an extended duration, e.g., at least about two, three, four, five, six, seven days or more, e.g., about one week, two weeks, three weeks, or about four weeks or longer.

[0804] Administration of the dsRNA according to the methods and uses of the invention may result in a reduction of the severity, signs, symptoms, and/or markers of such diseases or disorders in a patient with a complement component-associated disease. By “reduction” in this context is meant a statistically significant decrease in such level. The reduction can be, for example, at least about 5%, 10%, 15%, 20%, 25%, 30%, 35%, 40%, 45%, 50%, 55%, 60%, 65%, 70%, 75%, 80%, 85%, 90%, 95%, or about 100%.

[0805] Efficacy of treatment or prevention of disease can be assessed, for example by measuring disease progression, disease remission, symptom severity, reduction in pain, quality of life, dose of a medication required to sustain a treatment effect, level of a disease marker or any other measurable parameter appropriate for a given disease being treated or targeted for prevention. It is well within the ability of one skilled in the art to monitor efficacy of treatment or prevention by measuring any one of such parameters, or any combination of parameters. For example, efficacy of treatment of a hemolytic disorder may be assessed, for example, by periodic monitoring of LDH and CH₅₀ levels. Comparisons of the later readings with the initial readings provide a physician an indication of whether the treatment is effective. It is well within the ability of one skilled in the art to monitor efficacy of treatment or prevention by measuring any one of such parameters, or any combination of parameters. In connection with the administration of an iRNA targeting CFB, C3, and/or C9, or pharmaceutical composition thereof, “effective against” a complement component-associated disease indicates that administration in a clinically appropriate manner results in a beneficial effect for at least a statistically significant fraction of patients, such as improvement of symptoms, a cure, a reduction in disease, extension of life, improvement in quality of life, or other effect generally recognized as positive by medical doctors familiar with treating a complement component-associated disease and the related causes.

[0806] A treatment or preventive effect is evident when there is a statistically significant improvement in one or more parameters of disease status, or by a failure to worsen or to develop symptoms where they would otherwise be anticipated. As an example, a favorable change of at least 10% in a measurable parameter of disease, and preferably at least 20%, 30%, 40%, 50% or more can be indicative of effective treatment. Efficacy for a given iRNA drug or formulation of that drug can also be judged using an experimental animal model for the given disease as known in the art. When using an experimental animal model, efficacy of treatment is evidenced when a statistically significant reduction in a marker or symptom is observed.

[0807] Alternatively, the efficacy can be measured by a reduction in the severity of disease as determined by one skilled in the art of diagnosis based on a clinically accepted disease severity grading scale, as but one example the Rheumatoid Arthritis Severity Scale (RASS). Any positive change resulting in e.g., lessening of severity of disease measured using the appropriate scale, represents adequate treatment using an iRNA or iRNA formulation as described herein.

[0808] Subjects can be administered a therapeutic amount of iRNA, such as about 0.01 mg/kg, 0.02 mg/kg, 0.03 mg/kg, 0.04 mg/kg, 0.05 mg/kg, 0.1 mg/kg, 0.15 mg/kg, 0.2 mg/kg, 0.25 mg/kg, 0.3 mg/kg, 0.35 mg/kg, 0.4 mg/kg, 0.45 mg/kg, 0.5 mg/kg, 0.55 mg/kg, 0.6 mg/kg, 0.65 mg/kg, 0.7 mg/kg, 0.75 mg/kg, 0.8 mg/kg, 0.85 mg/kg, 0.9 mg/kg, 0.95 mg/kg, 1.0 mg/kg, 1.1 mg/kg, 1.2 mg/kg, 1.3 mg/kg, 1.4 mg/kg, 1.5 mg/kg, 1.6 mg/kg, 1.7 mg/kg, 1.8 mg/kg, 1.9 mg/kg, 2.0 mg/kg, 2.1 mg/kg, 2.2 mg/kg, 2.3 mg/kg, 2.4 mg/kg, 2.5 mg/kg dsRNA, 2.6 mg/kg dsRNA, 2.7 mg/kg dsRNA, 2.8 mg/kg dsRNA, 2.9 mg/kg dsRNA, 3.0 mg/kg dsRNA, 3.1 mg/kg dsRNA, 3.2 mg/kg dsRNA, 3.3 mg/kg dsRNA, 3.4 mg/kg dsRNA, 3.5 mg/kg dsRNA, 3.6 mg/kg dsRNA, 3.7 mg/kg dsRNA, 3.8 mg/kg dsRNA, 3.9 mg/kg dsRNA, 4.0 mg/kg dsRNA, 4.1 mg/kg dsRNA, 4.2 mg/kg dsRNA, 4.3 mg/kg dsRNA, 4.4 mg/kg dsRNA, 4.5 mg/kg dsRNA, 4.6 mg/kg dsRNA, 4.7 mg/kg dsRNA, 4.8 mg/kg dsRNA, 4.9 mg/kg dsRNA, 5.0 mg/kg dsRNA, 5.1 mg/kg dsRNA, 5.2 mg/kg dsRNA, 5.3 mg/kg dsRNA, 5.4 mg/kg dsRNA, 5.5 mg/kg dsRNA, 5.6 mg/kg dsRNA, 5.7 mg/kg dsRNA, 5.8 mg/kg dsRNA, 5.9 mg/kg dsRNA, 6.0 mg/kg dsRNA, 6.1 mg/kg dsRNA, 6.2 mg/kg dsRNA, 6.3 mg/kg dsRNA, 6.4 mg/kg dsRNA, 6.5 mg/kg dsRNA, 6.6 mg/kg dsRNA, 6.7 mg/kg dsRNA, 6.8 mg/kg dsRNA, 6.9 mg/kg dsRNA, 7.0 mg/kg dsRNA, 7.1 mg/kg dsRNA, 7.2 mg/kg dsRNA, 7.3 mg/kg dsRNA, 7.4 mg/kg dsRNA, 7.5 mg/kg dsRNA, 7.6 mg/kg dsRNA, 7.7 mg/kg dsRNA, 7.8 mg/kg dsRNA, 7.9 mg/kg dsRNA, 8.0 mg/kg dsRNA, 8.1 mg/kg dsRNA, 8.2 mg/kg dsRNA, 8.3 mg/kg dsRNA, 8.4 mg/kg dsRNA, 8.5 mg/kg dsRNA, 8.6 mg/kg dsRNA, 8.7 mg/kg dsRNA, 8.8 mg/kg dsRNA, 8.9 mg/kg dsRNA, 9.0 mg/kg dsRNA, 9.1 mg/kg dsRNA, 9.2 mg/kg dsRNA, 9.3 mg/kg dsRNA, 9.4 mg/kg dsRNA, 9.5 mg/kg dsRNA, 9.6 mg/kg dsRNA, 9.7 mg/kg dsRNA, 9.8 mg/kg dsRNA, 9.9 mg/kg dsRNA, 9.0 mg/kg dsRNA, 10 mg/kg dsRNA, 15 mg/kg dsRNA, 20 mg/kg dsRNA, 25 mg/kg dsRNA, 30 mg/kg dsRNA, 35 mg/kg dsRNA, 40 mg/kg dsRNA, 45 mg/kg dsRNA, or about 50 mg/kg dsRNA. Values and ranges intermediate to the recited values are also intended to be part of this invention.

[0809] In certain embodiments, for example, when a composition of the invention comprises a dsRNA as described herein and a lipid, subjects can be administered a therapeutic amount of iRNA, such as about 0.01 mg/kg to about 5 mg/kg, about 0.01 mg/kg to about 10 mg/kg, about 0.05 mg/kg to about 5 mg/kg, about 0.05 mg/kg to about 10 mg/kg, about 0.1 mg/kg to about 5 mg/kg, about 0.1 mg/kg to about 10 mg/kg, about 0.2 mg/kg to about 5 mg/kg, about 0.2 mg/kg to about 10 mg/kg, about 0.3 mg/kg to about 5 mg/kg, about 0.3 mg/kg to about 10 mg/kg, about 0.4 mg/kg to about 5 mg/kg, about 0.4 mg/kg to about 10 mg/kg, about 0.5 mg/kg to about 5 mg/kg, about 0.5 mg/kg to about 10 mg/kg, about 1 mg/kg to about 5 mg/kg, about 1 mg/kg to about 10 mg/kg, about 1.5 mg/kg to about 5 mg/kg, about 1.5 mg/kg to about 10 mg/kg, about 2 mg/kg to about 2.5 mg/kg, about 2 mg/kg to about 10 mg/kg, about 3 mg/kg to about 5 mg/kg, about 3 mg/kg to about 10 mg/kg, about 3.5 mg/kg to about 5 mg/kg, about 4 mg/kg to about 5 mg/kg, about 4.5 mg/kg to about 5 mg/kg, about 4 mg/kg to about 10 mg/kg, about 4.5 mg/kg to about 10 mg/kg, about 5 mg/kg to about 10 mg/kg, about 5.5 mg/kg to about 10 mg/kg, about 6 mg/kg to about 10 mg/kg, about 6.5 mg/kg to about 10 mg/kg, about 7 mg/kg to about 10 mg/kg, about 7.5 mg/kg to about 10 mg/kg, about 8 mg/kg to about 10 mg/kg, about 8.5 mg/kg to about 10 mg/kg, about 9 mg/kg to about 10 mg/kg, or about 9.5 mg/kg to about 10 mg/kg. Values and ranges intermediate to the recited values are also intended to be part of this invention.

[0810] For example, the dsRNA may be administered at a dose of about 0.1, 0.2, 0.3, 0.4, 0.5, 0.6, 0.7, 0.8, 0.9, 1, 1.1, 1.2, 1.3, 1.4, 1.5, 1.6, 1.7, 1.8, 1.9, 2, 2.1, 2.2, 2.3, 2.4, 2.5, 2.6, 2.7, 2.8, 2.9, 3, 3.1, 3.2, 3.3, 3.4, 3.5, 3.6, 3.7, 3.8, 3.9, 4, 4.1, 4.2, 4.3, 4.4, 4.5, 4.6, 4.7, 4.8, 4.9, 5, 5.1, 5.2, 5.3, 5.4, 5.5, 5.6, 5.7, 5.8, 5.9, 6, 6.1, 6.2, 6.3, 6.4, 6.5, 6.6, 6.7, 6.8, 6.9, 7, 7.1, 7.2, 7.3, 7.4, 7.5, 7.6, 7.7, 7.8, 7.9, 8, 8.1, 8.2, 8.3, 8.4, 8.5, 8.6, 8.7, 8.8, 8.9, 9, 9.1, 9.2, 9.3, 9.4, 9.5, 9.6, 9.7, 9.8, 9.9, or about 10 mg/kg. Values and ranges intermediate to the recited values are also intended to be part of this invention.

[0811] In other embodiments, for example, when a composition of the invention comprises a dsRNA as described herein and an N-acetylgalactosamine, subjects can be administered a therapeutic amount of iRNA, such as a dose of about 0.1 to about 50 mg/kg, about 0.25 to about 50 mg/kg, about 0.5 to about 50 mg/kg, about 0.75 to about 50 mg/kg, about 1 to about 50 mg/mg, about 1.5 to about 50 mg/kb, about 2 to about 50 mg/kg, about 2.5 to about 50 mg/kg, about 3 to about 50 mg/kg, about 3.5 to about 50 mg/kg, about 4 to about 50 mg/kg, about 4.5 to about 50 mg/kg, about 5 to about 50 mg/kg, about 7.5 to about 50 mg/kg, about 10 to about 50 mg/kg, about 15 to about 50 mg/kg, about 20 to about 50 mg/kg, about 20 to about 50 mg/kg, about 25 to about 50 mg/kg, about 25 to about 50 mg/kg, about 30 to about 50 mg/kg, about 35 to about 50 mg/kg, about 40 to about 50 mg/kg, about 45 to about 50 mg/kg, about 0.1 to about 45 mg/kg, about 0.25 to about 45 mg/kg, about 0.5 to about 45 mg/kg, about 0.75 to about 45 mg/kg, about 1 to about 45 mg/mg, about 1.5 to about 45 mg/kb, about 2 to about 45 mg/kg, about 2.5 to about 45 mg/kg, about 3 to about 45 mg/kg, about 3.5 to about 45 mg/kg, about 4 to about 45 mg/kg, about 4.5 to about 45 mg/kg, about 5 to about 45 mg/kg, about 7.5 to about 45 mg/kg, about 10 to about 45 mg/kg, about 15 to about 45 mg/kg, about 20 to about 45 mg/kg, about 20 to about 45 mg/kg, about 25 to about 45 mg/kg, about 25 to about 45 mg/kg, about 30 to about 45 mg/kg, about 35 to about 45 mg/kg, about 40 to about 45 mg/kg, about 0.1 to about 40 mg/kg, about 0.25 to about 40 mg/kg, about 0.5 to about 40 mg/kg, about 0.75 to about 40 mg/kg, about 1 to about 40 mg/mg, about 1.5 to about 40 mg/kb, about 2 to about 40 mg/kg, about 2.5 to about 40 mg/kg, about 3 to about 40 mg/kg, about 3.5 to about 40 mg/kg, about 4 to about 40 mg/kg, about 4.5 to about 40 mg/kg, about 5 to about 40 mg/kg, about 7.5 to about 40 mg/kg, about 10 to about 40 mg/kg, about 15 to about 40 mg/kg, about 20 to about 40 mg/kg, about 20 to about 40 mg/kg, about 25 to about 40 mg/kg, about 25 to about 40 mg/kg, about 30 to about 40 mg/kg, about 35 to about 40 mg/kg, about 0.1 to about 30 mg/kg, about 0.25 to about 30 mg/kg, about 0.5 to about 30 mg/kg, about 0.75 to about 30 mg/kg, about 1 to about 30 mg/mg, about 1.5 to about 30 mg/kb, about 2 to about 30 mg/kg, about 2.5 to about 30 mg/kg, about 3 to about 30 mg/kg, about 3.5 to about 30 mg/kg, about 4 to about 30 mg/kg, about 4.5 to about 30 mg/kg, about 5 to about 30 mg/kg, about 7.5 to about 30 mg/kg, about 10 to about 30 mg/kg, about 15 to about 30 mg/kg, about 20 to about 30 mg/kg, about 20 to about 30 mg/kg, about 25 to about 30 mg/kg, about 0.1 to about 20 mg/kg, about 0.25 to about 20 mg/kg, about 0.5 to about 20 mg/kg, about 0.75 to about 20 mg/kg, about 1 to about 20 mg/mg, about 1.5 to about 20 mg/kb, about 2 to about 20 mg/kg, about 2.5 to about 20 mg/kg, about 3 to about 20 mg/kg, about 3.5 to about 20 mg/kg, about 4 to about 20 mg/kg, about 4.5 to about 20 mg/kg, about 5 to about 20 mg/kg, about 7.5 to about 20 mg/kg, about 10 to about 20 mg/kg, or about 15 to about 20 mg/kg. In one embodiment, when a composition of the invention comprises a dsRNA as described herein and an N-acetylgalactosamine, subjects can be administered a therapeutic amount of about 10 to about 30 mg/kg of dsRNA. Values and ranges intermediate to the recited values are also intended to be part of this invention.

[0812] For example, subjects can be administered a therapeutic amount of iRNA, such as about 0.1, 0.2, 0.3, 0.4, 0.5, 0.6, 0.7, 0.8, 0.9, 1, 1.1, 1.2, 1.3, 1.4, 1.5, 1.6, 1.7, 1.8, 1.9, 2, 2.1, 2.2, 2.3, 2.4, 2.5, 2.6, 2.7, 2.8, 2.9, 3, 3.1, 3.2, 3.3, 3.4, 3.5, 3.6, 3.7, 3.8, 3.9, 4, 4.1, 4.2, 4.3, 4.4, 4.5, 4.6, 4.7, 4.8, 4.9, 5, 5.1, 5.2, 5.3, 5.4, 5.5, 5.6, 5.7, 5.8, 5.9, 6, 6.1, 6.2, 6.3, 6.4, 6.5, 6.6, 6.7, 6.8, 6.9, 7, 7.1, 7.2, 7.3, 7.4, 7.5, 7.6, 7.7, 7.8, 7.9, 8, 8.1, 8.2, 8.3, 8.4, 8.5, 8.6, 8.7, 8.8, 8.9, 9, 9.1, 9.2, 9.3, 9.4, 9.5, 9.6, 9.7, 9.8, 9.9, 10, 10.5, 11, 11.5, 12, 12.5, 13, 13.5, 14, 14.5, 15, 15.5, 16, 16.5, 17, 17.5, 18, 18.5, 19, 19.5, 20, 20.5, 21, 21.5, 22, 22.5, 23, 23.5, 24, 24.5, 25, 25.5, 26, 26.5, 27, 27.5, 28, 28.5, 29, 29.5, 30, 31, 32, 33, 34, 34, 35, 36, 37, 38, 39, 40, 41, 42, 43, 44, 45, 46, 47, 48, 49, or about 50 mg/kg. Values and ranges intermediate to the recited values are also intended to be part of this invention.

[0813] In certain embodiments of the invention, for example, when a double-stranded RNAi agent includes a modification (e.g., one or more motifs of three identical modifications on three consecutive nucleotides), including one such motif at or near the cleavage site of the agent, six phosphorothioate linkages, and a ligand, such an agent is administered at a dose of about 0.01 to about 0.5 mg/kg, about 0.01 to about 0.4 mg/kg, about 0.01 to about 0.3 mg/kg, about 0.01 to about 0.2 mg/kg, about 0.01 to about 0.1 mg/kg, about 0.01 mg/kg to about 0.09 mg/kg, about 0.01 mg/kg to about 0.08 mg/kg, about 0.01 mg/kg to about 0.07 mg/kg, about 0.01 mg/kg to about 0.06 mg/kg, about 0.01 mg/kg to about 0.05 mg/kg, about 0.02 to about 0.5 mg/kg, about 0.02 to about 0.4 mg/kg, about 0.02 to about 0.3 mg/kg, about 0.02 to about 0.2 mg/kg, about 0.02 to about 0.1 mg/kg, about 0.02 mg/kg to about 0.09 mg/kg, about 0.02 mg/kg to about 0.08 mg/kg, about 0.02 mg/kg to about 0.07 mg/kg, about 0.02 mg/kg to about 0.06 mg/kg, about 0.02 mg/kg to about 0.05 mg/kg, about 0.03 to about 0.5 mg/kg, about 0.03 to about 0.4 mg/kg, about 0.03 to about 0.3 mg/kg, about 0.03 to about 0.2 mg/kg, about 0.03 to about 0.1 mg/kg, about 0.03 mg/kg to about 0.09 mg/kg, about 0.03 mg/kg to about 0.08 mg/kg, about 0.03 mg/kg to about 0.07 mg/kg, about 0.03 mg/kg to about 0.06 mg/kg, about 0.03 mg/kg to about 0.05 mg/kg, about 0.04 to about 0.5 mg/kg, about 0.04 to about 0.4 mg/kg, about 0.04 to about 0.3 mg/kg, about 0.04 to about 0.2 mg/kg, about 0.04 to about 0.1 mg/kg, about 0.04 mg/kg to about 0.09 mg/kg, about 0.04 mg/kg to about 0.08 mg/kg, about 0.04 mg/kg to about 0.07 mg/kg, about 0.04 mg/kg to about 0.06 mg/kg, about 0.05 to about 0.5 mg/kg, about 0.05 to about 0.4 mg/kg, about 0.05 to about 0.3 mg/kg, about 0.05 to about 0.2 mg/kg, about 0.05 to about 0.1 mg/kg, about 0.05 mg/kg to about 0.09 mg/kg, about 0.05 mg/kg to about 0.08 mg/kg, or about 0.05 mg/kg to about 0.07 mg/kg. Values and ranges intermediate to the foregoing recited values are also intended to be part of this invention, e.g., the RNAi agent may be administered to the subject at a dose of about 0.015 mg/kg to about 0.45 mg/mg.

[0814] For example, the RNAi agent, e.g., RNAi agent in a pharmaceutical composition, may be administered at a dose of about 0.01 mg/kg, 0.0125 mg/kg, 0.015 mg/kg, 0.0175 mg/kg, 0.02 mg/kg, 0.0225 mg/kg, 0.025 mg/kg, 0.0275 mg/kg, 0.03 mg/kg, 0.0325 mg/kg, 0.035 mg/kg, 0.0375 mg/kg, 0.04 mg/kg, 0.0425 mg/kg, 0.045 mg/kg, 0.0475 mg/kg, 0.05 mg/kg, 0.0525 mg/kg, 0.055 mg/kg, 0.0575 mg/kg, 0.06 mg/kg, 0.0625 mg/kg, 0.065 mg/kg, 0.0675 mg/kg, 0.07 mg/kg, 0.0725 mg/kg, 0.075 mg/kg, 0.0775 mg/kg, 0.08 mg/kg, 0.0825 mg/kg, 0.085 mg/kg, 0.0875 mg/kg, 0.09 mg/kg, 0.0925 mg/kg, 0.095 mg/kg, 0.0975 mg/kg, 0.1 mg/kg, 0.125 mg/kg, 0.15 mg/kg, 0.175 mg/kg, 0.2 mg/kg, 0.225 mg/kg, 0.25 mg/kg, 0.275 mg/kg, 0.3 mg/kg, 0.325 mg/kg, 0.35 mg/kg, 0.375 mg/kg, 0.4 mg/kg, 0.425 mg/kg, 0.45 mg/kg, 0.475 mg/kg, or about 0.5 mg/kg. Values intermediate to the foregoing recited values are also intended to be part of this invention.

[0815] The iRNA can be administered by intravenous infusion over a period of time, such as over a 5, 6, 7, 8, 9, 10, 11, 12, 13, 14, 15, 16, 17, 18, 19, 20, 21, 22, 23, 24, or about a 25 minute period. The administration may be repeated, for example, on a regular basis, such as weekly, biweekly (i.e., every two weeks) for one month, two months, three months, four months or longer. After an initial treatment regimen, the treatments can be administered on a less frequent basis. For example, after administration weekly or biweekly for three months, administration can be repeated once per month, for six months or a year or longer.

[0816] Administration of the iRNA can reduce CFB, C3, and/or C9 (and/or C5) levels, e.g., in a cell, tissue, blood, urine or other compartment of the patient by at least about 5%, 6%, 7%, 8%, 9%, 10%, 11%, 12%, 13%, 14%, 15%, 16%, 17%, 18%, 19%, 20%, 21%, 22%, 23%, 24%, 25%, 26%, 27%, 28%, 29%, 30%, 31%, 32%, 33%, 34%, 35%, 36%, 37%, 38%, 39%, 40%, 41%, 42%, 43%, 44%, 45%, 46%, 47%, 48%, 49%, 50%, 51%, 52%, 53%, 54%, 55%, 56%, 57%, 58%, 59%, 60%, 61%, 62%, 63%, 64%, 65%, 66%, 67%, 68%, 69%, 70%, 71%, 72%, 73%, 74%, 75%, 76%, 77%, 78%, 79%, 80%, 81%, 82%, 83%, 84%, 85%, 86%, 87%, 88%, 89%, 90%, 91%, 92%, 93%, 94%, 95%, 96%, 97%, 98%, or at least about 99% or more.

[0817] Before administration of a full dose of the iRNA, patients can be administered a smaller dose, such as a 5% infusion, and monitored for adverse effects, such as an allergic reaction. In another example, the patient can be monitored for unwanted immunostimulatory effects, such as increased cytokine (e.g., TNF-alpha or INF-alpha) levels.

[0818] Owing to the inhibitory effects on CFB, C3, and/or C9 expression, a composition according to the invention or a pharmaceutical composition prepared therefrom can enhance the quality of life.

[0819] An iRNA of the invention may be administered in “naked” form, or as a “free iRNA.” A naked iRNA is administered in the absence of a pharmaceutical composition. The naked iRNA may be in a suitable buffer solution. The buffer solution may comprise acetate, citrate, prolamine, carbonate, or phosphate, or any combination thereof. In one embodiment, the buffer solution is phosphate buffered saline (PBS). The pH and osmolarity of the buffer solution containing the iRNA can be adjusted such that it is suitable for administering to a subject.

[0820] Alternatively, an iRNA of the invention may be administered as a pharmaceutical composition, such as a dsRNA liposomal formulation.

[0821] Subjects that would benefit from a reduction and/or inhibition of CFB, C3, and/or C9 gene expression are those having a complement component-associated disease or disorder as described herein. In one embodiment, a subject having a complement component-associated disease has paroxysmal nocturnal hemoglobinuria (PNH). In another embodiment, a subject having a complement component-associated disease has asthma. In another embodiment, a subject having a complement component-associated disease has rheumatoid arthritis. In yet another embodiment, a subject having a complement component-associated disease has systemic lupus erythmatosis. In one embodiment, a subject having a complement component-associated disease has glomerulonephritis. In another embodiment, a subject having a complement component-associated disease has psoriasis. In yet another embodiment, a subject having a complement component-associated disease has dermatomyositis bullous pemphigoid. In one embodiment, a subject having a complement component-associated disease has atypical hemolytic uremic syndrome. In another embodiment, a subject having a complement component-associated disease has Shiga toxin E. coli-related hemolytic uremic syndrome. In another embodiment, a subject having a complement component-associated disease has myasthenia gravis. In yet another embodiment, a subject having a complement component-associated disease has neuromyelistis optica. In one embodiment, a subject having a complement component-associated disease has dense deposit disease. In one embodiment, a subject having a complement component-associated disease has C3 neuropathy. In another embodiment, a subject having a complement component-associated disease has age-related macular degeneration. In another embodiment, a subject having a complement component-associated disease has cold agglutinin disease. In one embodiment, a subject having a complement component-associated disease has anti-neutrophil cytoplasmic antibody-associated vasculitis. In another embodiment, a subject having a complement component-associated disease has humoral and vascular transplant rejection. In one embodiment, a subject having a complement component-associated disease has graft dysfunction. In one embodiment, a subject having a complement component-associated disease has had a myocardial infarction. In another embodiment, a subject having a complement component-associated disease is a sensitized recipient of a transplant. In yet another embodiment, a subject having a complement component-associated disease has sepsis.

[0822] Treatment of a subject that would benefit from a reduction and/or inhibition of CFB, C3, and/or C9 gene expression includes therapeutic and prophylactic (e.g., the subject is to undergo sensitized (or allogenic) transplant surgery treatment.

[0823] The invention further provides methods and uses of an iRNA agent or a pharmaceutical composition thereof (including methods and uses of an iRNA agent or a pharmaceutical composition comprising an iRNA agent and an additional therapeutic agent, e.g. an anti-complement component C5 antibody, or antigen-binding fragment thereof) for treating a subject that would benefit from reduction and/or inhibition of a target gene of the invention, e.g., CFB, C3, and C9, expression, e.g., a subject having a complement component-associated disease, in combination with other pharmaceuticals and/or other therapeutic methods, e.g., with known pharmaceuticals and/or known therapeutic methods, such as, for example, those which are currently employed for treating these disorders. For example, in certain embodiments, an iRNA targeting CFB is administered in combination with, e.g., an agent useful in treating a complement component-associated disease as described elsewhere herein.

[0824] For example, additional therapeutics and therapeutic methods suitable for treating a subject that would benefit from reducton in CFB, C3, and/or C9 expression, e.g., a subject having a complement component-associated disease, include plasmaphoresis, thrombolytic therapy (e.g., streptokinase), antiplatelet agents, folic acid, corticosteroids; immunosuppressive agents; estrogens, methotrexate, 6-MP, azathioprine sulphasalazine, mesalazine, olsalazine, chloroquinine/hydroxychloroquine, pencillamine, aurothiomalate (intramuscular and oral), azathioprine, cochicine, corticosteroids (oral, inhaled and local injection), beta-2 adrenoreceptor agonists (salbutamol, terbutaline, salmeteral), xanthines (theophylline, aminophylline), cromoglycate, nedocromil, ketotifen, ipratropium and oxitropium, cyclosporin, FK506, rapamycin, mycophenolate mofetil, leflunomide, NSAIDs, for example, ibuprofen, corticosteroids such as prednisolone, phosphodiesterase inhibitors, adensosine agonists, antithrombotic agents, complement inhibitors, adrenergic agents, agents which interfere with signalling by proinflammatory cytokines, such as TNF-α or IL-1 (e.g., IRAK, NIK, IKK, p38 or MAP kinase inhibitors), IL-1ß converting enzyme inhibitors, TNFα converting enzyme (TACE) inhibitors, T-cell signalling inhibitors, such as kinase inhibitors, metalloproteinase inhibitors, sulfasalazine, azathioprine, 6-mercaptopurines, angiotensin converting enzyme inhibitors, soluble cytokine receptors and derivatives thereof (e.g., soluble p55 or p75 TNF receptors and the derivatives p75TNFRIgG (Enbrel™ and p55TNFRIgG (Lenercept)), SIL-IRI, SIL-IRII, and sIL-6R), antiinflammatory cytokines (e.g., IL-4, IL-10, IL-11, IL-13 and TGFβ), celecoxib, folic acid, hydroxychloroquine sulfate, rofecoxib, etanercept, infliximonoclonal antibody, naproxen, valdecoxib, sulfasalazine, methylprednisolone, meloxicam, methylprednisolone acetate, gold sodium thiomalate, aspirin, triamcinolone acetonide, propoxyphene napsylate/apap, folate, nabumetone, diclofenac, piroxicam, etodolac, diclofenac sodium, oxaprozin, oxycodone hydrochloride, hydrocodone bitartrate/apap, diclofenac sodium/misoprostol, fentanyl, anakinra, human recombinant, tramadol hydrochloride, salsalate, sulindac, cyanocobalamin/folic acid/pyridoxine, acetaminophen, alendronate sodium, prednisolone, morphine sulfate, lidocaine hydrochloride, indomethacin, glucosamine sulf/chondroitin, amitriptyline hydrochloride, sulfadiazine, oxycodone hydrochloride/acetaminophen, olopatadine hydrochloride, misoprostol, naproxen sodium, omeprazole, cyclophosphamide, rituximonoclonal antibody, IL-1 TRAP, MRA, CTLA4-IG, IL-18 BP, anti-IL-18, Anti-IL15, BIRB-796, SCIO-469, VX-702, AMG-548, VX-740, Roflumilast, IC-485, CDC-801, Mesopram, cyclosporine, cytokine suppressive anti-inflammatory drug(s) (CSAIDs); CDP-571/BAY-10-3356 (humanized anti-TNFα antibody; Celltech/Bayer); cA2/infliximonoclonal antibody (chimeric anti-TNFα antibody; Centocor); 75 kdTNFR-IgG/etanercept (75 kD TNF receptor-IgG fusion protein; Immunex; see e.g., (1994) Arthr. Rheum. 37: S295; (1996) J. Invest. Med. 44: 235A); 55 kdTNF-IgG (55 kD TNF receptor-IgG fusion protein; Hoffmann-LaRoche); IDEC-CE9.1/SB 210396 (non-depleting primatized anti-CD4 antibody; IDEC/SmithKline; see e.g., (1995) Arthr. Rheum. 38: S185); DAB 486-IL-2 and/or DAB 389-IL-2 (IL-2 fusion proteins; Seragen; see e.g., (1993) Arthrit. Rheum. 36:1223); Anti-Tac (humanized anti-IL-2Ra; Protein Design Labs/Roche); IL-4 (anti-inflammatory cytokine; DNAX/Schering); IL-10 (SCH 52000; recombinant IL-10, anti-inflammatory cytokine; DNAX/Schering); IL-4; IL-10 and/or IL-4 agonists (e.g., agonist antibodies); IL-IRA (IL-1 receptor antagonist; Synergen/Amgen); anakinra (Kineret*/Amgen); TNF-bp/s-TNF (soluble TNF binding protein; see e.g., (1996) Arthr. Rheum. 39 (9 (supplement)): S284; (1995) Amer. J. Physiol.—Heart and Circ. Physiol. 268:37-42); R973401 (phosphodiesterase Type IV inhibitor; see e.g., (1996) Arthr. Rheum. 39 (9 (supplement): S282); MK-966 (COX-2 Inhibitor; see e.g., (1996) Arthr. Rheum. 39 (9 (supplement): S81); Iloprost (see e.g., (1996) Arthr. Rheum. 39 (9 (supplement): S82); methotrexate; thalidomide (see e.g., (1996) Arthr. Rheum. 39 (9 (supplement): S282) and thalidomide-related drugs (e.g., Celgen); leflunomide (anti-inflammatory and cytokine inhibitor; see e.g., (1996) Arthr. Rheum. 39 (9 (supplement): S131; (1996) Inflamm. Res. 45:103-107); tranexamic acid (inhibitor of plasminogen activation; see e.g., (1996) Arthr. Rheum. 39 (9 (supplement): S284); T-614 (cytokine inhibitor; see e.g., (1996) Arthr. Rheum. 39 (9 (supplement): S282); prostaglandin El (see e.g., (1996) Arthr. Rheum. 39 (9 (supplement): S282); Tenidap (non-steroidal anti-inflammatory drug; see e.g., (1996) Arthr. Rheum. 39 (9 (supplement): S280); Naproxen (non-steroidal anti-inflammatory drug; see e.g., (1996) Neuro. Report 7:1209-1213); Meloxicam (non-steroidal anti-inflammatory drug); Ibuprofen (non-steroidal anti-inflammatory drug); Piroxicam (non-steroidal anti-inflammatory drug); Diclofenac (non-steroidal anti-inflammatory drug); Indomethacin (non-steroidal anti-inflammatory drug); Sulfasalazine (see e.g., (1996) Arthr. Rheum. 39 (9 (supplement): S281); Azathioprine (see e.g., (1996) Arthr. Rheum. 39 (9 (supplement): S281); ICE inhibitor (inhibitor of the enzyme interleukin-1ß converting enzyme); zap-70 and/or lck inhibitor (inhibitor of the tyrosine kinase zap-70 or lck); VEGF inhibitor and/or VEGF-R inhibitor (inhibitors of vascular endothelial cell growth factor or vascular endothelial cell growth factor receptor; inhibitors of angiogenesis); corticosteroid anti-inflammatory drugs (e.g., SB203580); TNF-convertase inhibitors; anti-IL-12 antibodies; anti-IL-18 antibodies; interleukin-11 (see e.g., (1996) Arthr. Rheum. 39 (9 (supplement): S296); interleukin-13 (see e.g., (1996) Arthr. Rheum. 39 (9 (supplement): S308); interleukin-17 inhibitors (see e.g., (1996) Arthr. Rheum. 39 (9 (supplement): S120); gold; penicillamine; chloroquine; chlorambucil; hydroxychloroquine; cyclosporine; cyclophosphamide; total lymphoid irradiation; anti-thymocyte globulin; anti-CD4 antibodies; CD5-toxins; orally-administered peptides and collagen; lobenzarit disodium; Cytokine Regulating Agents (CRAs) HP228 and HP466 (Houghten Pharmaceuticals, Inc.); ICAM-1 antisense phosphorothioate oligo-deoxynucleotides (ISIS 2302; Isis Pharmaceuticals, Inc.); soluble complement receptor 1 (TP10; T Cell Sciences, Inc.); prednisone; orgotein; glycosaminoglycan polysulphate; minocycline; anti-IL2R antibodies; marine and botanical lipids (fish and plant seed fatty acids; see e.g., DeLuca et al. (1995) Rheum. Dis. Clin. North Am. 21:759-777); auranofin; phenylbutazone; meclofenamic acid; flufenamic acid; intravenous immune globulin; zileuton; azaribine; mycophenolic acid (RS-61443); tacrolimus (FK-506); sirolimus (rapamycin); amiprilose (therafectin); cladribine (2-chlorodeoxyadenosine); methotrexate; bcl-2 inhibitors (see Bruncko, M. et al. (2007) J. Med. Chem. 50 (4): 641-662); antivirals and immune-modulating agents, small molecule inhibitor of KDR, small molecule inhibitor of Tie-2; methotrexate; prednisone; celecoxib; folic acid; hydroxychloroquine sulfate; rofecoxib; etanercept; infliximonoclonal antibody; leflunomide; naproxen; valdecoxib; sulfasalazine; methylprednisolone; ibuprofen; meloxicam; methylprednisolone acetate; gold sodium thiomalate; aspirin; azathioprine; triamcinolone acetonide; propxyphene napsylate/apap; folate; nabumetone; diclofenac; piroxicam; etodolac; diclofenac sodium; oxaprozin; oxycodone hcl; hydrocodone bitartrate/apap; diclofenac sodium/misoprostol; fentanyl; anakinra, human recombinant; tramadol hcl; salsalate; sulindac; cyanocobalamin/fa/pyridoxine; acetaminophen; alendronate sodium; prednisolone; morphine sulfate; lidocaine hydrochloride; indomethacin; glucosamine sulfate/chondroitin; cyclosporine; amitriptyline hydrochloride; sulfadiazine; oxycodone hcl/acetaminophen; olopatadine hcl; misoprostol; naproxen sodium; omeprazole; mycophenolate mofetil; cyclophosphamide; rituximonoclonal antibody; IL-1 TRAP; MRA; CTLA4-IG; IL-18 BP; IL-12/23; anti-IL 18; anti-IL 15; BIRB-796; SCIO-469; VX-702; AMG-548; VX-740; Roflumilast; IC-485; CDC-801; mesopram, albuterol, salmeterol/fluticasone, montelukast sodium, fluticasone propionate, budesonide, prednisone, salmeterol xinafoate, levalbuterol hcl, albuterol sulfate/ipratropium, prednisolone sodium phosphate, triamcinolone acetonide, beclomethasone dipropionate, ipratropium bromide, azithromycin, pirbuterol acetate, prednisolone, theophylline anhydrous, methylprednisolone sodium succinate, clarithromycin, zafirlukast, formoterol fumarate, influenza virus vaccine, methylprednisolone, amoxicillin trihydrate, flunisolide, allergy injection, cromolyn sodium, fexofenadine hydrochloride, flunisolide/menthol, amoxicillin/clavulanate, levofloxacin, inhaler assist device, guaifenesin, dexamethasone sodium phosphate, moxifloxacin hcl, doxycycline hyclate, guaifenesin/d-methorphan, p-ephedrine/cod/chlorphenir, gatifloxacin, cetirizine hydrochloride, mometasone furoate, salmeterol xinafoate, benzonatate, cephalexin, pe/hydrocodone/chlorphenir, cetirizine hcl/pseudoephed, phenylephrine/cod/promethazine, codeine/promethazine, cefprozil, dexamethasone, guaifenesin/pseudoephedrine, chlorpheniramine/hydrocodone, nedocromil sodium, terbutaline sulfate, epinephrine, methylprednisolone, metaproterenol sulfate, aspirin, nitroglycerin, metoprolol tartrate, enoxaparin sodium, heparin sodium, clopidogrel bisulfate, carvedilol, atenolol, morphine sulfate, metoprolol succinate, warfarin sodium, lisinopril, isosorbide mononitrate, digoxin, furosemide, simvastatin, ramipril, tenecteplase, enalapril maleate, torsemide, retavase, losartan potassium, quinapril hcl/mag carb, bumetanide, alteplase, enalaprilat, amiodarone hydrochloride, tirofiban hcl m-hydrate, diltiazem hydrochloride, captopril, irbesartan, valsartan, propranolol hydrochloride, fosinopril sodium, lidocaine hydrochloride, eptifibatide, cefazolin sodium, atropine sulfate, aminocaproic acid, spironolactone, interferon, sotalol hydrochloride, potassium chloride, docusate sodium, dobutamine hcl, alprazolam, pravastatin sodium, atorvastatin calcium, midazolam hydrochloride, meperidine hydrochloride, isosorbide dinitrate, epinephrine, dopamine hydrochloride, bivalirudin, rosuvastatin, ezetimibe/simvastatin, avasimibe, and cariporide.

[0825] The iRNA agent (and/or an anti-complement component C5 antibody) and an additional therapeutic agent and/or treatment may be administered at the same time and/or in the same combination, e.g., parenterally, or the additional therapeutic agent can be administered as part of a separate composition or at separate times and/or by another method known in the art or described herein.

[0826] Unless otherwise defined, all technical and scientific terms used herein have the same meaning as commonly understood by one of ordinary skill in the art to which this invention belongs. Although methods and materials similar or equivalent to those described herein can be used in the practice or testing of the iRNAs and methods featured in the invention, suitable methods and materials are described below. All publications, patent applications, patents, and other references mentioned herein are incorporated by reference in their entirety. In case of conflict, the present specification, including definitions, will control. In addition, the materials, methods, and examples are illustrative only and not intended to be limiting.

### EXAMPLES

### Example 1. RNA Synthesis

### Source of Reagents

[0827] Where the source of a reagent is not specifically given herein, such reagent can be obtained from any supplier of reagents for molecular biology at a quality/purity standard for application in molecular biology.

### Transcripts

[0828] siRNA design was carried out to identify siRNAs targeting human (Homo sapiens), cynomolgus monkey (Macaca fascicularis; henceforth “cyno”), mouse (Mus musculus), and rat (Rattus norvegicus) transcripts. In general, the design of duplexes used human, mouse, and rat transcripts from the NCBI RefSeq collection, annotated in the NCBI Gene database (http://www.ncbi.nlm.nih.gov/gene/). For cyno, the design used either transcripts downloaded from the M. fascicularis genome project (http://macaque.genomics.org.cn/page/species/download.jsp) and/or transcripts obtained from a liver-derived cDNA library.

[0829] Design of CFB siRNAs used the following transcripts from the NCBI RefSeq collection: Human-NM_001710; Cyno (from the M. fascicularis genome project)-ENSMMUP00000000985 (locus=scaffold3881: 47830:53620); Mouse-NM_001142706 and NM_008198; and Rat-NM 212466.3.

[0830] Design of C3 siRNAs used the following transcripts from the NCBI RefSeq collection: Human-NM_000064; Cyno (from the M. fascicularis genome project)-ENSP00000245907 (locus=chr19:6921416:6963034); Mouse-NM_009778; and Rat-NM_016994

[0831] Design of C9 siRNAs used the following transcripts from the NCBI RefSeq collection: Human-NM_001737; Cyno (from liver cDNA library)-isotig05361; Mouse—NM 013485; AND Rat-NM 057146.

[0832] siRNA duplexes were designed in several separate batches, including but not limited to batches containing duplexes matching human transcripts only; human and cyno transcripts; human, cyno, and mouse transcripts; AND human, cyno, mouse, and rat transcripts. Most siRNA duplexes were designed that shared 100% identity with the listed human transcript and other species transcripts considered in each design batch (above). In some instances, however, when the antisense strand: target mRNA complementary basepair was a GC or CG pair, siRNA duplexes were designed with mismatches between duplex and mRNA target at the first antisense (last sense) position (see, e.g. Table 5, oligos with label G21U, G21A, C21A, G21A). In these cases, duplexes were designed with UA or AU basepairs at the first antisense: last sense pair. Thus the duplexes maintained complementarity but were mismatched with respect to target (U: C, U: G, A: C, or A: G).

siRNA Design, Specificity, and Efficacy Prediction

[0833] The predicted specificity of all possible 19mers was predicted from each sequence. Candidate 19mers were then selected that lacked repeats longer than 7 nucleotides.

[0834] The following sets of candidate siRNAs were used in comprehensive searches against the appropriate transcriptomes (defined as the set of NM_and XM_records within the human, mouse, or rat NCBI Refseq sets, and the cyno transcriptome set in NCBI nucleotide) using an exhaustive “brute-force” algorithm implemented in the python script ‘BruteForce.py’.

[0835] C3: 46 human/cyno/mouse/rat, 80 human/cyno/mouse, 2384 human/cyno.

[0836] C9: 7 human/cyno/mouse/rat, 12 human/cyno/mouse, 816 human/cyno.

[0837] CFB: 23 human/cyno/mouse, 1232 human/cyno.

[0838] The script next parsed the transcript-oligo alignments to generate a score based on the position and number of mismatches between the siRNA and any potential ‘off-target’ transcript. The off-target score is weighted to emphasize differences in the ‘seed’ region of siRNAs, in positions 2-9 from the 5′-end of the molecule.

[0839] Each oligo-transcript pair from the brute-force search was given a mismatch score by summing the individual mismatch scores; mismatches in the position 2-9 were counted as 2.8, mismatches in the cleavage site positions 10-11 were counted as 1.2, and mismatches in region 12-19 counted as 1.0. An additional off-target prediction was carried out by comparing the frequency of heptamers and octomers derived from 3 distinct, seed-derived hexamers of each oligo. The hexamers from positions 2-7 relative to the 5′ start were used to create 2 heptamers and one octamer. ‘Heptamerl’ was created by adding a 3′-A to the hexamer; heptamer2 was created by adding a 5′-A to the hexamer; the octomer was created by adding an A to both 5′- and 3′-ends of the hexamer. The frequency of octamers and heptamers in the human, rhesus, mouse, or rat 3′-UTRome (defined as the subsequence of the transcriptome from NCBI's Refseq database where the end of the coding region, the ‘CDS’, is clearly defined) was pre-calculated. The octamer frequency was normalized to the heptamer frequency using the median value from the range of octamer frequencies. A ‘mirSeedScore’ was then calculated by calculating the sum of ((3×normalized octamer count)+ (2×heptamer2 count)+ (1×heptamer1 count)).

[0840] Both siRNAs strands were assigned to a category of specificity according to the calculated scores: a score above 3 qualifies as highly specific, equal to 3 as specific and between 2.2 and 2.8 as moderately specific. The duplexes were sorted by the specificity of the antisense strand and those duplexes whose antisense oligos lacked GC at the first position, lacked G at both positions 13 and 14, and had 3 or more Us or As in the seed region were selected.

[0841] For GalNaC-conjugated duplexes, sense 21mer and antisense 23mer oligos were designed by extending antisense 19mers (described above) to 23 nucleotides of target-complementary sequence. All species transcripts included in the design batch were checked for complementarity. Only 23mers that preserved 100% sequence complementarity in at least 2 species were used. For each duplex, the sense 21mer was specified as the reverse complement of the first 21 nucleotides of the antisense strand.

siRNA Sequence Selection

[0842] The following 21/23mer duplex sets for GalNac conjugate design were synthesized and formed into duplexes.

[0843] C3: twenty sense and 20 antisense derived human/cyno/mouse/rat oligo pairs, including 6 where the first antisense position was swapped to UA (above); 10 sense and 10 antisense derived human/cyno/mouse oligo pairs, including 3 where the first antisense position was swapped to UA (above); 12 sense and 12 antisense derived human/cyno oligo pairs.

[0844] C9: one sense and 1 antisense derived human/cyno/mouse/rat oligo pair; 2 sense and 2 antisense derived human/cyno/mouse oligo pairs; 1 sense and 1 antisense derived human/cyno/rat oligo pairs; 19 sense and 19 antisense derived human/cyno oligo pairs.

[0845] CFB: nine sense and 9 antisense derived human/cyno/mouse oligo pairs, including 4 where the first antisense position was swapped to UA (above); 23 sense and 23 antisense derived human/cyno oligo pairs.

[0846] A detailed list of CFB sense and antisense strand sequences is shown in Tables 3-4.

[0847] A detailed list of C3 sense and antisense strand sequences is shown in Tables 5-6.

[0848] A detailed list of C9 sense and antisense strand sequences is shown in Tables 7-8.

siRNA Synthesis

### General Small and Medium Scale RNA Synthesis Procedure

[0849] RNA oligonucleotides were synthesized at scales between 0.2-500 μmol using commercially available 5′-O-(4,4′-dimethoxytrityl)-2′-O-t-butyldimethylsilyl-3′-O-(2-cyanoethyl-N,N-diisopropyl)phosphoramidite monomers of uridine, 4-N-acetylcytidine, 6-N-benzoyladenosine and 2-N-isobutyrylguanosine and the corresponding 2′-O-methyl and 2′-fluoro phosphoramidites according to standard solid phase oligonucleotide synthesis protocols. The amidite solutions were prepared at 0.1-0.15 M concentration and 5-ethylthio-1H-tetrazole (0.25-0.6 M in acetonitrile) was used as the activator. Phosphorothioate backbone modifications were introduced during synthesis using 0.2 M phenylacetyl disulfide (PADS) in lutidine:acetonitrile (1:1) (v;v) or 0.1 M 3-(dimethylaminomethylene)amino-3H-1,2,4-dithiazole-5-thione (DDTT) in pyridine for the oxidation step. After completion of synthesis, the sequences were cleaved from the solid support and deprotected using methylamine followed by triethylamine. 3HF to remove any 2′-O-t-butyldimethylsilyl protecting groups present.

[0850] For synthesis scales between 5-500 μmol and fully 2′ modified sequences (2′-fluoro and/or 2′-O-methyl or combinations thereof) the oligonucleotides where deprotected using 3:1 (v/v) ethanol and concentrated (28-32%) aqueous ammonia either at 35° C. 16 h or 55° C. for 5.5 h. Prior to ammonia deprotection the oligonucleotides where treated with 0.5 M piperidine in acetonitrile for 20 min on the solid support. The crude oligonucleotides were analyzed by LC-MS and anion-exchange HPLC (IEX-HPLC). Purification of the oligonucleotides was carried out by IEX HPLC using: 20 mM phosphate, 10%-15% ACN, pH=8.5 (buffer A) and 20 mM phosphate, 10%-15% ACN, 1 M NaBr, pH=8.5 (buffer B). Fractions were analyzed for purity by analytical HPLC. The product-containing fractions with suitable purity were pooled and concentrated on a rotary evaporator prior to desalting. The samples were desalted by size exclusion chromatography and lyophilized to dryness. Equal molar amounts of sense and antisense strands were annealed in 1×PBS buffer to prepare the corresponding siRNA duplexes.

[0851] For small scales (0.2-1 μmol), synthesis was performed on a MerMade 192 synthesizer in a 96 well format. In case of fully 2′-modified sequences (2′-fluoro and/or 2′-O-methyl or combinations thereof) the oligonucleotides where deprotected using methylamine at room temperature for 30-60 min followed by incubation at 60° C. for 30 min or using 3:1 (v/v) ethanol and concentrated (28-32%) aqueous ammonia at room temperature for 30-60 min followed by incubation at 40° C. for 1.5 hours. The crude oligonucleotides were then precipitated in a solution of acetonitrile:acetone (9:1) and isolated by centrifugation and decanting the supernatant. The crude oligonucleotide pellet was re-suspended in 20 mM NaOAc buffer and analyzed by LC-MS and anion exchange HPLC. The crude oligonucleotide sequences were desalted in 96 deep well plates on a 5 mL HiTrap Sephadex G25 column (GE Healthcare). In each well about 1.5 mL samples corresponding to an individual sequence was collected. These purified desalted oligonucleotides were analyzed by LC-MS and anion exchange chromatography. Duplexes were prepared by annealing equimolar amounts of sense and antisense sequences on a Tecan robot. Concentration of duplexes was adjusted to 10 μM in 1×PBS buffer.

### I. Synthesis of GalNAc-Conjugated Oligonucleotides for In Vivo Analysis

[0852] Oligonucleotides conjugated with GalNAc ligand at their 3′-terminus were synthesized at scales between 0.2-500 μmol using a solid support pre-loaded with a Y-shaped linker bearing a 4,4′-dimethoxytrityl (DMT)-protected primary hydroxy group for oligonucleotide synthesis and a GalNAc ligand attached through a tether.

[0853] For synthesis of GalNAc conjugates in the scales between 5-500 μmol, the above synthesis protocol for RNA was followed with the following adaptions: For polystyrene-based synthesis supports 5% dichloroacetic acid in toluene was used for DMT-cleavage during synthesis. Cleavage from the support and deprotection was performed as described above. Phosphorothioate-rich sequences (usually >5 phorphorothioates) were synthesized without removing the final 5′-DMT group (“DMT-on”) and, after cleavage and deprotection as described above, purified by reverse phase HPLC using 50 mM ammonium acetate in water (buffer A) and 50 mM ammoniumacetate in 80% acetonitirile (buffer B). Fractions were analyzed for purity by analytical HPLC and/or LC-MS. The product-containing fractions with suitable purity were pooled and concentrated on a rotary evaporator. The DMT-group was removed using 20%-25% acetic acid in water until completion. The samples were desalted by size exclusion chromatography and lyophilized to dryness. Equal molar amounts of sense and antisense strands were annealed in 1×PBS buffer to prepare the corresponding siRNA duplexes.

[0854] For small scale synthesis of GalNAc conjugates (0.2-1 μmol), including sequences with multiple phosphorothioate linkages, the protocols described above for synthesis of RNA or fully 2′-F/2′-OMe-containing sequences on MerMade platform were applied. Synthesis was performed on pre-packed columns containing GalNAc-functionalized controlled pore glass support.

### Example 2. In Vitro Screening

### Cell Culture and Transfections

[0855] Hep3B cells (ATCC, Manassas, VA) were grown to near confluence at 37° C. in an atmosphere of 5% CO2 in Eagle's Minimum Essential Medium (ATCC) supplemented with 10% FBS, streptomycin, and glutamine (ATCC) before being released from the plate by trypsinization. Cells were washed and re-suspended at 0.25×10⁶ cells/ml. During transfections, cells were plated onto a 96-well plate with about 20,000 cells per well.

[0856] Primary mouse hepatocytes (PMH) were freshly isolated from a C57BL/6 female mouse (Charles River Labortories International, Inc. Willmington, MA) less than 1 hour prior to transfections and grown in primary hepatocyte media. Cells were resuspended at 0.11×10⁶ cells/ml in In VitroGRO CP Rat (plating) medium (Celsis In Vitro Technologies, catalog number S01494). During transfections, cells were plated onto a BD BioCoat 96 well collagen plate (BD, 356407) at 10,000 cells per well and incubated at 37° C. in an atmosphere of 5% CO2.

[0857] For Hep3B and PMH, transfection was carried out by adding 14.8 μl of Opti-MEM plus 0.2 μl of Lipofectamine RNAiMax per well (Invitrogen, Carlsbad CA. catalog number 13778-150) to 5 μl of each siRNA duplex to an individual well in a 96-well plate. The mixture was then incubated at room temperature for 20 minutes. Eighty μl of complete growth media without antibiotic containing the appropriate cell number were then added to the siRNA mixture. Cells were incubated for 24 hours prior to RNA purification.

[0858] Single dose experiments were performed at 1 nM and 0.01 nM final duplex concentration for GalNAc modified sequences. Dose response experiments were done at 3, 1, 0.3, 0.1, 0.037, 0.0123, 0.00412, and 0.00137 nM final duplex concentration for primary mouse hepatocytes and at 3, 1, 0.3, 0.1, 0.037, 0.0123, 0.00412, 0.00137, 0.00046, 0.00015, 0.00005, and 0.000017 nM final duplex concentration for Hep3B cells.

Total RNA Isolation Using DYNABEADS mRNA Isolation Kit (Invitrogen, Part #: 610-12)

[0859] Cells were harvested and lysed in 150 μl of Lysis/Binding Buffer then mixed for 5 minutes at 850 rpm using an Eppendorf Thermomixer (the mixing speed was the same throughout the process). Ten microliters of magnetic beads and 80 μl Lysis/Binding Buffer mixture were added to a round bottom plate and mixed for 1 minute. Magnetic beads were captured using a magnetic stand and the supernatant was removed without disturbing the beads. After removing the supernatant, the lysed cells were added to the remaining beads and mixed for 5 minutes. After removing the supernatant, magnetic beads were washed 2 times with 150 μl Wash Buffer A and mixed for 1 minute. The beads were captured again and the supernatant was removed. The beads were then washed with 150 μl Wash Buffer B, captured and the supernatant was removed. The beads were next washed with 150 μl Elution Buffer, captured and the supernatant removed. Finally, the beads were allowed to dry for 2 minutes. After drying, 50 μl of Elution Buffer was added and mixed for 5 minutes at 70° C. The beads were captured on magnet for 5 minutes. Forty-five μl of supernatant was removed and added to another 96 well plate.

cDNA Synthesis Using ABI High Capacity cDNA Reverse Transcription Kit (Applied Biosystems, Foster City, CA, Cat #4368813)

[0860] A master mix of 2 μl 10× Buffer, 0.8 μl 25×dNTPs, 2 μl Random primers, 1 μl Reverse Transcriptase, 1 μl RNase inhibitor and 3.2 μl of H2O per reaction as prepared. Equal volumes master mix and RNA were mixed for a final volume of 12 μl for in vitro screened or 20 μl for in vivo screened samples. cDNA was generated using a Bio-Rad C-1000 or S-1000 thermal cycler (Hercules, CA) through the following steps: 25° C. for 10 minutes, 37° C. for 120 minutes, 85° C. for 5 seconds, and 4° C. hold.

### Real Time PCR

[0861] Two μl of cDNA were added to a master mix containing 2 μl of H₂O, 0.5 μl GAPDH TaqMan Probe (Life Technologies catalog number 4326317E for Hep3B cells, catalog number 352339E for primary mouse hepatocytes or custom probe for cynomolgus primary hepatocytes), 0.5 μl of appropriate TaqMan probe (Life Technologies c catalog number Hs00156197_m1 for Hep3B cells or mm00439275_ml for Primary Mouse Hepatoctyes or custom probe for cynomolgus primary hepatocytes) and 5 μl Lightcycler 480 probe master mix (Roche catalog number 04887301001) per well in a 384 well plates (Roche catalog number 04887301001). Real time PCR was performed in an Roche LC480 Real Time PCR system (Roche) using the AACt (RQ) assay. For in vitro screening, each duplex was tested with two biological replicates unless otherwise noted and each Real Time PCR was performed in duplicate technical replicates. For in vivo screening, each duplex was tested in one or more experiments (3 mice per group) and each Real Time PCR was run in duplicate technical replicates.

[0862] To calculate relative fold change in mRNA levels, real time data were analyzed using the ΔΔCt method and normalized to assays performed with cells transfected with 10 nM AD-1955, or mock transfected cells. IC₅₀s were calculated using a 4 parameter fit model using XLFit and normalized to cells transfected with AD-1955 over the same dose range, or to its own lowest dose.

[0863] The sense and antisense sequences of AD-1955 are:

(SEQ ID NO: 39)
SENSE: cuuAcGcuGAGuAcuucGAdTsdT
(SEQ ID NO: 40)
ANTISENSE: UCGAAGuACUcAGCGuAAGdTsdT.

[0864] Table 9 shows the results of a single dose screen in Hep3B cells transfected with the indicated CFB GalNAC conjugated iRNAs. Data are expressed as percent of message remaining relative to untreated cells.

[0865] Table 10 shows the results of a single dose screen in primary mouse hepatocytes ransfected with the indicated CFB GalNAC conjugated iRNAs. Data are expressed as percent of message remaining relative to untreated cells.

[0866] Table 11 shows the dose response in Hep3B cells transfected with the indicated CFB GalNAC conjugated iRNAs. The indicated IC₅₀ values represent the IC₅₀ values relative to untreated cells.

[0867] Table 12 shows the dose response in primary mouse hepatocytes transfected with the indicated CFB GalNAC conjugated iRNAs. The indicated IC₅₀ values represent the IC₅₀ values relative to untreated cells.

[0868] Table 13 shows the results of a single dose screen in primary mouse hepatocytes ransfected with the indicated C9 GalNAC conjugated iRNAs. Data are expressed as percent of message remaining relative to untreated cells.

[0869] Table 14 shows the results of a single dose screen in primary mouse hepatocytes ransfected with the indicated C3 GalNAC conjugated iRNAs. Data are expressed as percent of message remaining relative to untreated cells.

[0870] Table 15 shows the results of a single dose screen in Hep3B cells transfected with the indicated C3 GalNAC conjugated iRNAs. Data are expressed as percent of message remaining relative to untreated cells.

[0871] Table 16 shows the dose response in primary mouse hepatocytes transfected with the indicated C3 GalNAC conjugated iRNAs. The indicated IC₅₀ values represent the IC₅₀ values relative to untreated cells.

[0872] Table 17 shows the dose response in Hep3B cells transfected with the indicated C3 GalNAC conjugated iRNAs. The indicated IC₅₀ values represent the IC₅₀ values relative to untreated cells.

TABLE 2
Abbreviations of nucleotide monomers used in nucleic acid sequence
representation. It will be understood that these monomers, when
present in an oligonucleotide, are mutually linked by 5′-3′-
phosphodiester bonds.

| Abbreviation | Nucleotide(s) |
|---|---|
| A | Adenosine-3′-phosphate |
| Af | 2′-fluoroadenosine-3′-phosphate |
| Afs | 2′-fluoroadenosine-3′-phosphorothioate |
| As | adenosine-3′-phosphorothioate |
| C | cytidine-3′-phosphate |
| Cf | 2′-fluorocytidine-3′-phosphate |
| Cfs | 2′-fluorocytidine-3′-phosphorothioate |
| Cs | cytidine-3′-phosphorothioate |
| G | guanosine-3′-phosphate |
| Gf | 2′-fluoroguanosine-3′-phosphate |
| Gfs | 2′-fluoroguanosine-3′-phosphorothioate |
| Gs | guanosine-3′-phosphorothioate |
| T | 5′-methyluridine-3′-phosphate |
| Tf | 2′-fluoro-5-methyluridine-3′-phosphate |
| Tfs | 2′-fluoro-5-methyluridine-3′-phosphorothioate |
| Ts | 5-methyluridine-3′-phosphorothioate |
| U | Uridine-3′-phosphate |
| Uf | 2′-fluorouridine-3′-phosphate |
| Ufs | 2′-fluorouridine-3′-phosphorothioate |
| Us | uridine-3′-phosphorothioate |
| N | any nucleotide (G, A, C, T or U) |
| a | 2′-O-methyladenosine-3′-phosphate |
| as | 2′-O-methyladenosine-3′-phosphorothioate |
| c | 2′-O-methylcytidine-3′-phosphate |
| cs | 2′-O-methylcytidine-3′-phosphorothioate |
| g | 2′-O-methylguanosine-3′-phosphate |
| gs | 2′-O-methylguanosine-3′-phosphorothioate |
| t | 2′-O-methyl-5-methyluridine-3′-phosphate |
| ts | 2′-O-methyl-5-methyluridine-3′-phosphorothioate |
| u | 2′-O-methyluridine-3′-phosphate |
| us | 2′-O-methyluridine-3′-phosphorothioate |
| s | phosphorothioate linkage |
| L96 | N-[tris(GalNAc-alkyl)-amidodecanoyl)]-4- |
| | hydroxyprolinol Hyp-(GalNAc-alkyl)3 |

TABLE 3
Complement Factor B (CFB) unmodified sequences
Human CFB Sequences

| | | Sense Sequence | | | Antisense Sequence | |
|---|---|---|---|---|---|---|
| | | (SEQ ID NOS: 41-71, | | | (SEQ ID NOS: 72-102, | |
| | | respectively, in order | Position in | | respectively, in order | Position in |
| Duplex ID | Sense ID | of appearance) | NM_001710.5 | Antisense ID | of appearance) | NM_001710.5 |
| AD-60315.1 | A-122021.1 | AUUCCUGAAUUUUAUGACUAU | 1987-2007 | A-122022.1 | AUAGUCAUAAAAUUCAGGAAUUC | 1985-2007 |
| AD-60326.1 | A-122009.1 | CCUGAUCAAGCUCAAGAAUAA | 2016-2036 | A-122010.1 | UUAUUCUUGAGCUUGAUCAGGGC | 2014-2036 |
| AD-60303.1 | A-122017.1 | GAAGCAGGAAUUCCUGAAUUU | 1978-1998 | A-122018.1 | AAAUUCAGGAAUUCCUGCUUCUU | 1976-1998 |
| AD-60331.1 | A-121995.1 | AGCAACAUGUGUUCAAAGUCA | 1628-1648 | A-121996.1 | UGACUUUGAACACAUGUUGCUCA | 1626-1648 |
| AD-60344.1 | A-122015.1 | GCUGUGGUGUCUGAGUACUUU | 1822-1842 | A-122016.1 | AAAGUACUCAGACACCACAGCCC | 1820-1842 |
| AD-60345.1 | A-122031.1 | AAGUGUCUAGUCAACUUAAUU | 1153-1173 | A-122032.1 | AAUUAAGUUGACUAGACACUUUU | 1151-1173 |
| AD-60319.1 | A-121991.1 | AGCUGUGAGAGAGAUGCUCAA | 2245-2265 | A-121992.1 | UUGAGCAUCUCUCUCACAGCUGC | 2243-2265 |
| AD-60308.1 | A-122003.1 | AGCCAAAAAGUGUCUAGUCAA | 1146-1166 | A-122004.1 | UUGACUAGACACUUUUUGGCUCC | 1144-1166 |
| AD-60332.1 | A-122011.1 | UGUGAGUGAUGAGAUCUCUUU | 648-668 | A-122012.1 | AAAGAGAUCUCAUCACUCACAUU | 646-668 |
| AD-60313.1 | A-121989.1 | AAUUGAGAAGGUGGCAAGUUA | 1170-1190 | A-121990.1 | UAACUUGCCACCUUCUCAAUUAA | 1168-1190 |
| AD-60321.1 | A-122023.1 | CAACAUGUGUUCAAAGUCAAG | 1630-1650 | A-122024.1 | CUUGACUUUGAACACAUGUUGCU | 1628-1650 |
| AD-60327.1 | A-122025.1 | UGUGAGAGAGAUGCUCAAUAU | 2248-2268 | A-122026.1 | AUAUUGAGCAUCUCUCUCACAGC | 2246-2268 |
| AD-60302.1 | A-122001.1 | GUCUAGUCAACUUAAUUGAGA | 1157-1177 | A-122002.1 | UCUCAAUUAAGUUGACUAGACAC | 1155-1177 |
| AD-60325.1 | A-121993.1 | UCCAAGAAAGACAAUGAGCAA | 1612-1632 | A-121994.1 | UUGCUCAUUGUCUUUCUUGGAAG | 1610-1632 |
| AD-60337.1 | A-121997.1 | UGUGUUCAAAGUCAAGGAUAU | 1635-1655 | A-121998.1 | AUAUCCUUGACUUUGAACACAUG | 1633-1655 |
| AD-60333.1 | A-122027.1 | AUUGAUGAGAUCCGGGACUUG | 1486-1506 | A-122028.1 | CAAGUCCCGGAUCUCAUCAAUGA | 1484-1506 |
| AD-60314.1 | A-122005.1 | CUGUGAGAGAGAUGCUCAAUA | 2247-2267 | A-122006.1 | UAUUGAGCAUCUCUCUCACAGCU | 2245-2267 |
| AD-60320.1 | A-122007.1 | GAGCCAAAAAGUGUCUAGUCA | 1145-1165 | A-122008.1 | UGACUAGACACUUUUUGGCUCCU | 1143-1165 |
| AD-60339.1 | A-122029.1 | UCCAAGAUGAGGAUUUGGGUU | 2549-2569 | A-122030.1 | AACCCAAAUCCUCAUCUUGGAGU | 2547-2569 |
| AD-60338.1 | A-122013.1 | CCCUUGAUAGUUCACAAGAGA | 2386-2406 | A-122014.1 | UCUCUUGUGAACUAUCAAGGGGC | 2384-2406 |
| AD-60307.1 | A-121987.1 | CAAAGUCAAGGAUAUGGAAAA | 1641-1661 | A-121988.1 | UUUUCCAUAUCCUUGACUUUGAA | 1639-1661 |
| AD-60309.1 | A-122019.1 | UAGUUCACAAGAGAAGUCGUU | 2393-2413 | A-122020.1 | AACGACUUCUCUUGUGAACUAUC | 2391-2413 |
| AD-60343.1 | A-121999.1 | GGCCCCUUGAUAGUUCACAAG | 2383-2403 | A-122000.1 | CUUGUGAACUAUCAAGGGGCCGC | 2381-2403 |
| AD-60324.1 | A-121977.1 | UGGUGCUAGAUGGAUCAGACA | 1100-1120 | A-121978.1 | UGUCUGAUCCAUCUAGCACCAGG | 1098-1120 |
| AD-60318.1 | A-121975.1 | GCUAGAUGGAUCAGACAGCAU | 1104-1124 | A-121976.1 | AUGCUGUCUGAUCCAUCUAGCAC | 1102-1124 |
| AD-60300.1 | A-121969.1 | UACCUGGUGCUAGAUGGAUCA | 1096-1116 | A-121970.1 | UGAUCCAUCUAGCACCAGGUAGA | 1094-1116 |
| AD-60330.1 | A-121979.1 | GGUGCUAGAUGGAUCAGACAA | 1101-1121 | A-121980.1 | UUGUCUGAUCCAUCUAGCACCAG | 1099-1121 |
| | | | (G19A) | | | (G19A) |
| AD-60306.1 | A-121971.1 | UCUGAGUCUCUGUGGCAUGGU | 1704-1724 | A-121972.1 | ACCAUGCCACAGAGACUCAGAGA | 1702-1724 |
| AD-60336.1 | A-121981.1 | GUGCUAGAUGGAUCAGACAGA | 1102-1122 | A-121982.1 | UCUGUCUGAUCCAUCUAGCACCA | 1100-1122 |
| | | | (C19A) | | | (C19A) |
| AD-60301.1 | A-121985.1 | CUACCUGGUGCUAGAUGGAUA | 1095-1115 | A-121986.1 | UAUCCAUCUAGCACCAGGUAGAU | 1093-1115 |
| | | | (C19A) | | | (C19A) |
| AD-60342.1 | A-121983.1 | ACCUGGUGCUAGAUGGAUCAA | 1097-1117 | A-121984.1 | UUGAUCCAUCUAGCACCAGGUAG | 1095-1117 |
| | | | (G19A) | | | (G19A) |

Rodent CFB Sequences

| | | Sense Sequence | | | Antisense Sequence | |
|---|---|---|---|---|---|---|
| | | (SEQ ID NOS: 103-117, | | | (SEQ ID NOS: 118-132, | |
| | | respectively, in order | Position in | | respectively, in order | Position in |
| Duplex ID | Sense ID | of appearance) | NM_001142706.1 | Antisense ID | of appearance) | NM_001142706.1 |
| AD-60334.1 | A-122043.1 | GCAAGCCAAGAUCUCAGUCAC | 1888-1908 | A-122044.1 | GUGACUGAGAUCUUGGCUUGCCA | 1886-1908 |
| AD-60304.1 | A-122033.1 | GAUUGAGAAGGUGGCGAGUUA | 1291-1311 | A-122034.1 | UAACUCGCCACCUUCUCAAUCAA | 1289-1311 |
| AD-60310.1 | A-122035.1 | CACAAGAGAAGCCGCUUCAUU | 2515-2535 | A-122036.1 | AAUGAAGCGGCUUCUCUUGUGAA | 2513-2535 |
| AD-60328.1 | A-122041.1 | UUGUGAGAGAGAUGCUACAAA | 2364-2384 | A-122042.1 | UUUGUAGCAUCUCUCUCACAACU | 2362-2384 |
| AD-60322.1 | A-122039.1 | UCCUUCAUGAAUGUUCCGGGA | 193-213 | A-122040.1 | UCCCGGAACAUUCAUGAAGGAGG | 191-213 |
| AD-60316.1 | A-122037.1 | UCACAGAGAAGCUCAACCAAA | 1407-1427 | A-122038.1 | UUUGGUUGAGCUUCUCUGUGACC | 1405-1427 |
| AD-60346.1 | A-122047.1 | CUCAACCAAAUCAGUUAUGAA | 1418-1438 | A-122048.1 | UUCAUAACUGAUUUGGUUGAGCU | 1416-1438 |
| AD-60335.1 | A-122059.1 | CCCUGACAGAGACCAUCGAAG | 1113-1133 | A-122060.1 | CUUCGAUGGUCUCUGUCAGGGAG | 1111-1133 |
| AD-60323.1 | A-122055.1 | GAGCAGAUUGCAUAAAAGGUU | 261-281 | A-122056.1 | AACCUUUUAUGCAAUCUGCUCUG | 259-281 |
| AD-60340.1 | A-122045.1 | CUUCAUGAAUGUUCCGGGAAG | 195-215 | A-122046.1 | CUUCCCGGAACAUUCAUGAAGGA | 193-215 |
| AD-60305.1 | A-122049.1 | CUUCAUUCAAGUUGGUGUGAU | 2529-2549 | A-122050.1 | AUCACACCAACUUGAAUGAAGCG | 2527-2549 |
| AD-60317.1 | A-122053.1 | GAUUGAAGAGGUCCUGUUCCA | 2050-2070 | A-122054.1 | UGGAACAGGACCUCUUCAAUCUC | 2048-2070 |
| AD-60329.1 | A-122057.1 | AUUUCUUUUCAAUGCUAUGAU | 782-802 | A-122058.1 | AUCAUAGCAUUGAAAAGAAAUCU | 780-802 |
| AD-60341.1 | A-122061.1 | CCAGAGCAGAUUGCAUAAAAG | 258-278 | A-122062.1 | CUUUUAUGCAAUCUGCUCUGGCA | 256-278 |
| AD-60311.1 | A-122051.1 | CACAGAGAAGCUCAACCAAAU | 1408-1428 | A-122052.1 | AUUUGGUUGAGCUUCUCUGUGAC | 1406-1428 |

TABLE 4
Complement Factor B (CFB) modified sequences
Human CFB Sequences

| | | Sense Sequence | | Antisense Sequence |
|---|---|---|---|---|
| | | (SEQ ID NOS 133-163, respectively, | | (SEQ ID NOS 164-194, respectively, |
| Duplex ID | Sense ID | in order of appearance) | Antisense ID | in order of appearance) |
| AD-60315.1 | A-122021.1 | AfsusUfcCfuGfaAfUfUfuUfaUfgAfcUfaUfL96 | A-122022.1 | asUfsaGfuCfaUfaAfaauUfcAfgGfaAfususc |
| AD-60326.1 | A-122009.1 | CfscsUfgAfuCfaAfGfCfuCfaAfgAfaUfaAfL96 | A-122010.1 | usUfsaUfuCfuUfgAfgcuUfgAfuCfaGfgsgsc |
| AD-60303.1 | A-122017.1 | GfsasAfgCfaGfgAfAfUfuCfcUfgAfaUfuUfL96 | A-122018.1 | asAfsaUfuCfaGfgAfauuCfcUfgCfuUfcsusu |
| AD-60331.1 | A-121995.1 | AfsgsCfaAfcAfuGfUfGfuUfcAfaAfgUfcAfL96 | A-121996.1 | usGfsaCfuUfuGfaAfcacAfuGfuUfgCfuscsa |
| AD-60344.1 | A-122015.1 | GfscsUfgUfgGfuGfUfCfuGfaGfuAfcUfuUfL96 | A-122016.1 | asAfsaGfuAfcUfcAfgacAfcCfaCfaGfcscsc |
| AD-60345.1 | A-122031.1 | AfsasGfuGfuCfuAfGfUfcAfaCfuUfaAfuUfL96 | A-122032.1 | asAfsuUfaAfgUfuGfacuAfgAfcAfcUfususu |
| AD-60319.1 | A-121991.1 | AfsgsCfuGfuGfaGfAfGfaGfaUfgCfuCfaAfL96 | A-121992.1 | usUfsgAfgCfaUfcUfcucUfcAfcAfgCfusgsc |
| AD-60308.1 | A-122003.1 | AfsgsCfcAfaAfaAfGfUfgUfcUfaGfuCfaAfL96 | A-122004.1 | usUfsgAfcUfaGfaCfacuUfuUfuGfgCfuscsc |
| AD-60332.1 | A-122011.1 | UfsgsUfgAfgUfgAfUfGfaGfaUfcUfcUfuUfL96 | A-122012.1 | asAfsaGfaGfaUfcUfcauCfaCfuCfaCfasusu |
| AD-60313.1 | A-121989.1 | AfsasUfuGfaGfaAfGfGfuGfgCfaAfgUfuAfL96 | A-121990.1 | usAfsaCfuUfgCfcAfccuUfcUfcAfaUfusasa |
| AD-60321.1 | A-122023.1 | CfsasAfcAfuGfuGfUfUfcAfaAfgUfcAfaGfL96 | A-122024.1 | csUfsuGfaCfuUfuGfaacAfcAfuGfuUfgscsu |
| AD-60327.1 | A-122025.1 | UfsgsUfgAfgAfgAfGfAfuGfcUfcAfaUfaUfL96 | A-122026.1 | asUfsaUfuGfaGfcAfucuCfuCfuCfaCfasgsc |
| AD-60302.1 | A-122001.1 | GfsusCfuAfgUfcAfAfCfuUfaAfuUfgAfgAfL96 | A-122002.1 | usCfsuCfaAfuUfaAfguuGfaCfuAfgAfcsasc |
| AD-60325.1 | A-121993.1 | UfscsCfaAfgAfaAfGfAfcAfaUfgAfgCfaAfL96 | A-121994.1 | usUfsgCfuCfaUfuGfucuUfuCfuUfgGfasasg |
| AD-60337.1 | A-121997.1 | UfsgsUfgUfuCfaAfAfGfuCfaAfgGfaUfaUfL96 | A-121998.1 | asUfsaUfcCfuUfgAfcuuUfgAfaCfaCfasusg |
| AD-60333.1 | A-122027.1 | AfsusUfgAfuGfaGfAfUfcCfgGfgAfcUfuGfL96 | A-122028.1 | csAfsaGfuCfcCfgGfaucUfcAfuCfaAfusgsa |
| AD-60314.1 | A-122005.1 | CfsusGfuGfaGfaGfAfGfaUfgCfuCfaAfuAfL96 | A-122006.1 | usAfsuUfgAfgCfaUfcucUfcUfcAfcAfgscsu |
| AD-60320.1 | A-122007.1 | GfsasGfcCfaAfaAfAfGfuGfuCfuAfgUfcAfL96 | A-122008.1 | usGfsaCfuAfgAfcAfcuuUfuUfgGfcUfcscsu |
| AD-60339.1 | A-122029.1 | UfscsCfaAfgAfuGfAfGfgAfuUfuGfgGfuUfL96 | A-122030.1 | asAfscCfcAfaAfuCfcucAfuCfuUfgGfasgsu |
| AD-60338.1 | A-122013.1 | CfscsCfuUfgAfuAfGfUfuCfaCfaAfgAfgAfL96 | A-122014.1 | usCfsuCfuUfgUfgAfacuAfuCfaAfgGfgsgsc |
| AD-60307.1 | A-121987.1 | CfsasAfaGfuCfaAfGfGfaUfaUfgGfaAfaAfL96 | A-121988.1 | usUfsuUfcCfaUfaUfccuUfgAfcUfuUfgsasa |
| AD-60309.1 | A-122019.1 | UfsasGfuUfcAfcAfAfGfaGfaAfgUfcGfuUfL96 | A-122020.1 | asAfscGfaCfuUfcUfcuuGfuGfaAfcUfasusc |
| AD-60343.1 | A-121999.1 | GfsgsCfcCfcUfuGfAfUfaGfuUfcAfcAfaGfL96 | A-122000.1 | csUfsuGfuGfaAfcUfaucAfaGfgGfgCfcsgsc |
| AD-60324.1 | A-121977.1 | UfsgsGfuGfcUfaGfAfUfgGfaUfcAfgAfcAfL96 | A-121978.1 | usGfsuCfuGfaUfcCfaucUfaGfcAfcCfasgsg |
| AD-60318.1 | A-121975.1 | GfscsUfaGfaUfgGfAfUfcAfgAfcAfgCfaUfL96 | A-121976.1 | asUfsgCfuGfuCfuGfaucCfaUfcUfaGfcsasc |
| AD-60300.1 | A-121969.1 | UfsasCfcUfgGfuGfCfUfaGfaUfgGfaUfcAfL96 | A-121970.1 | usGfsaUfcCfaUfcUfagcAfcCfaGfgUfasgsa |
| AD-60330.1 | A-121979.1 | GfsgsUfgCfuAfgAfUfGfgAfuCfaGfaCfaAfL96 | A-121980.1 | usUfsgUfcUfgAfuCfcauCfuAfgCfaCfcsasg |
| AD-60306.1 | A-121971.1 | UfscsUfgAfgUfcUfCfUfgUfgGfcAfuGfgUfL96 | A-121972.1 | asCfscAfuGfcCfaCfagaGfaCfuCfaGfasgsa |
| AD-60336.1 | A-121981.1 | GfsusGfcUfaGfaUfGfGfaUfcAfgAfcAfgAfL96 | A-121982.1 | usCfsuGfuCfuGfaUfccaUfcUfaGfcAfcscsa |
| AD-60301.1 | A-121985.1 | Cfsus AfcCfuGfgUfGfCfuAfgAfuGfgAfuAfL96 | A-121986.1 | usAfsuCfcAfuCfuAfgcaCfcAfgGfuAfgsasu |
| AD-60342.1 | A-121983.1 | AfscsCfuGfgUfgCfUfAfgAfuGfgAfuCfaAfL96 | A-121984.1 | usUfsgAfuCfcAfuCfuagCfaCfcAfgGfusasg |

Rodent CFB Sequence

| | | Sense Sequence | | Antisense Sequence |
|---|---|---|---|---|
| | | (SEQ ID NOS 195-209, respectively, | | (SEQ ID NOS 210-224, respectively, |
| Duplex ID | Sense ID | in order of appearance) | Antisense ID | in order of appearance) |
| AD-60334.1 | A-122043.1 | GfscsAfaGfcCfaAfGfAfuCfuCfaGfuCfaCfL96 | A-122044.1 | gsUfsgAfcUfgAfgAfucuUfgGfcUfuGfcscsa |
| AD-60304.1 | A-122033.1 | GfsasUfuGfaGfaAfGfGfuGfgCfgAfgUfuAfL96 | A-122034.1 | usAfsaCfuCfgCfcAfccuUfcUfcAfaUfcsasa |
| AD-60310.1 | A-122035.1 | CfsasCfaAfgAfgAfAfGfcCfgCfuUfcAfuUfL96 | A-122036.1 | asAfsuGfaAfgCfgGfcuuCfuCfuUfgUfgsasa |
| AD-60328.1 | A-122041.1 | UfsusGfuGfaGfaGfAfGfaUfgCfuAfcAfaAfL96 | A-122042.1 | usUfsuGfuAfgCfaUfcucUfcUfcAfcAfascsu |
| AD-60322.1 | A-122039.1 | UfscsCfuUfcAfuGfAfAfuGfuUfcCfgGfgAfL96 | A-122040.1 | usCfscCfgGfaAfcAfuucAfuGfaAfgGfasgsg |
| AD-60316.1 | A-122037.1 | UfscsAfcAfgAfgAfAfGfcUfcAfaCfcAfaAfL96 | A-122038.1 | usUfsuGfgUfuGfaGfcuuCfuCfuGfuGfascsc |
| AD-60346.1 | A-122047.1 | CfsusCfaAfcCfaAfAfUfcAfgUfuAfuGfaAfL96 | A-122048.1 | usUfscAfuAfaCfuGfauuUfgGfuUfgAfgscsu |
| AD-60335.1 | A-122059.1 | CfscsCfuGfaCfaGfAfGfaCfcAfuCfgAfaGfL96 | A-122060.1 | csUfsuCfgAfuGfgUfcucUfgUfcAfgGfgsasg |
| AD-60323.1 | A-122055.1 | GfsasGfcAfgAfuUfGfCfaUfaAfaAfgGfuUfL96 | A-122056.1 | asAfscCfuUfuUfaUfgcaAfuCfuGfcUfcsusg |
| AD-60340.1 | A-122045.1 | CfsusUfcAfuGfaAfUfGfuUfcCfgGfgAfaGfL96 | A-122046.1 | csUfsuCfcCfgGfaAfcauUfcAfuGfaAfgsgsa |
| AD-60305.1 | A-122049.1 | CfsusUfcAfuUfcAfAfGfuUfgGfuGfuGfaUfL96 | A-122050.1 | asUfscAfcAfcCfaAfcuuGfaAfuGfaAfgscsg |
| AD-60317.1 | A-122053.1 | GfsasUfuGfaAfgAfGfGfuCfcUfgUfuCfcAfL96 | A-122054.1 | usGfsgAfaCfaGfgAfccuCfuUfcAfaUfcsusc |
| AD-60329.1 | A-122057.1 | AfsusUfuCfuUfuUfCfAfaUfgCfuAfuGfaUfL96 | A-122058.1 | asUfscAfuAfgCfaUfugaAfaAfgAfaAfuscsu |
| AD-60341.1 | A-122061.1 | CfscsAfgAfgCfaGfAfUfuGfcAfuAfaAfaGfL96 | A-122062.1 | csUfsuUfuAfuGfcAfaucUfgCfuCfuGfgscsa |
| AD-60311.1 | A-122051.1 | CfsasCfaGfaGfaAfGfCfuCfaAfcCfaAfaUfL96 | A-122052.1 | asUfsuUfgGfuUfgAfgcuUfcUfcUfgUfgsasc |

TABLE 5
C3 unmodified sequences

| | | Sense Sequence | | | Antisense Seqeunce | |
|---|---|---|---|---|---|---|
| | | (SEQ ID NOS 225-265, | | | (SEQ ID NOS 266-306, | |
| | | respectively, in | Position in | | respectively, in | Position in |
| Duplex ID | Sense ID | order of appearance) | NM_000064.2 | Antisense ID | order of appearance) | NM_000064.2 |
| AD-60149.1 | A-121853.1 | CGUGGUCAAGGUCUUCUCUCU | 3309-3329 | A-121854.1 | AGAGAGAAGACCUUGACCACGUA | 3307-3329 |
| AD-60151.1 | A-121885.1 | ACGUGGUCAAGGUCUUCUCUA | 3308-3324_ | A-121886.1 | UAGAGAAGACCUUGACCACGUAG | 3306-3324_ |
| | | | C21A | | | C21A |
| AD-60152.1 | A-121901.1 | UUUGACCUCAUGGUGUUCGUG | 1174-1194 | A-121902.1 | CACGAACACCAUGAGGUCAAAGG | 1172-1194 |
| AD-60153.1 | A-121917.1 | GGAGAAUUGCUUCAUACAAAA | 4611-4631 | A-121918.1 | UUUUGUAUGAAGCAAUUCUCCUC | 4609-4631 |
| AD-60154.1 | A-121933.1 | UGUUAAAUGGCUGAUCCUGGA | 3375-3395 | A-121934.1 | UCCAGGAUCAGCCAUUUAACAGC | 3373-3395 |
| AD-60155.1 | A-121855.1 | GACAGACAAGACCAUCUACAC | 465-485 | A-121856.1 | GUGUAGAUGGUCUUGUCUGUCUG | 463-485 |
| AD-60156.1 | A-121871.1 | CCAGACAGACAAGACCAUCUA | 462-482 | A-121872.1 | UAGAUGGUCUUGUCUGUCUGGAU | 460-482 |
| AD-60157.1 | A-121887.1 | CCAGAUCCACUUCACCAAGAA | 1125-1141_ | A-121888.1 | UUCUUGGUGAAGUGGAUCUGGUA | 1123-1141_ |
| | | | C21A | | | C21A |
| AD-60158.1 | A-121903.1 | UUGACCUCAUGGUGUUCGUGA | 1175-1195 | A-121904.1 | UCACGAACACCAUGAGGUCAAAG | 1173-1195 |
| AD-60159.1 | A-121919.1 | CCCCUUCGAGGUCACAGUAAU | 2523-2543 | A-121920.1 | AUUACUGUGACCUCGAAGGGGUC | 2521-2543 |
| AD-60160.1 | A-121935.1 | AUGAACAAAACUGUGGCUGUU | 2878-2898 | A-121936.1 | AACAGCCACAGUUUUGUUCAUUC | 2876-2898 |
| AD-60161.1 | A-121857.1 | AGACAGACAAGACCAUCUACA | 464-484 | A-121858.1 | UGUAGAUGGUCUUGUCUGUCUGG | 462-484 |
| AD-60162.1 | A-121873.1 | CCAGAUCCACUUCACCAAGAC | 1125-1145 | A-121874.1 | GUCUUGGUGAAGUGGAUCUGGUA | 1123-1145 |
| AD-60163.1 | A-121889.1 | AGGGAUCUGUGUGGCAGACCA | 2505-2521_ | A-121890.1 | UGGUCUGCCACACAGAUCCCUUU | 2503-2521_ |
| | | | C21A | | | C21A |
| AD-60164.1 | A-121905.1 | GACAAGACCAUCUACACCCCU | 469-489 | A-121906.1 | AGGGGUGUAGAUGGUCUUGUCUG | 467-489 |
| AD-60165.1 | A-121921.1 | GCUGAGGAGAAUUGCUUCAUA | 4606-4626 | A-121922.1 | UAUGAAGCAAUUCUCCUCAGCAC | 4604-4626 |
| AD-60166.1 | A-121859.1 | ACGUGGUCAAGGUCUUCUCUC | 3308-3328 | A-121860.1 | GAGAGAAGACCUUGACCACGUAG | 3306-3328 |
| AD-60167.1 | A-121875.1 | GGAUCUGUGUGGCAGACCCCU | 2507-2527 | A-121876.1 | AGGGGUCUGCCACACAGAUCCCU | 2505-2527 |
| AD-60168.1 | A-121891.1 | ACAGACAAGACCAUCUACACA | 466-482_ | A-121892.1 | UGUGUAGAUGGUCUUGUCUGUCU | 464-482_ |
| | | | C21A | | | C21A |
| AD-60169.1 | A-121907.1 | AUCCAGACAGACAAGACCAUU | 460-476_ | A-121908.1 | AAUGGUCUUGUCUGUCUGGAUGA | 458-476_ |
| | | | C21U | | | C21U |
| AD-60170.1 | A-121923.1 | CUCCGUGUGGGUGGACGUCAA | 1713-1733 | A-121924.1 | UUGACGUCCACCCACACGGAGUC | 1711-1733 |
| AD-60171.1 | A-121861.1 | UCCAGACAGACAAGACCAUCU | 461-481 | A-121862.1 | AGAUGGUCUUGUCUGUCUGGAUG | 459-481 |
| AD-60172.1 | A-121877.1 | AGGGAUCUGUGUGGCAGACCC | 2505-2525 | A-121878.1 | GGGUCUGCCACACAGAUCCCUUU | 2503-2525 |
| AD-60173.1 | A-121893.1 | CAAGAAAGGGAUCUGUGUGGA | 2499-2515_ | A-121894.1 | UCCACACAGAUCCCUUUCUUGUC | 2497-2515_ |
| | | | C21A | | | C21A |
| AD-60174.1 | A-121909.1 | UGACCUCAUGGUGUUCGUGAU | 1176-1192_ | A-121910.1 | AUCACGAACACCAUGAGGUCAAA | 1174-1192_ |
| | | | C21U | | | C21U |
| AD-60175.1 | A-121925.1 | GCAGCUAAAAGACUUUGACUU | 3789-3809 | A-121926.1 | AAGUCAAAGUCUUUUAGCUGCAG | 3787-3809 |
| AD-60176.1 | A-121863.1 | CAUCCAGACAGACAAGACCAU | 459-479 | A-121864.1 | AUGGUCUUGUCUGUCUGGAUGAA | 457-479 |
| AD-60177.1 | A-121879.1 | ACAGACAAGACCAUCUACACC | 466-486 | A-121880.1 | GGUGUAGAUGGUCUUGUCUGUCU | 464-486 |
| AD-60178.1 | A-121895.1 | AUCCAGACAGACAAGACCAUC | 460-480 | A-121896.1 | GAUGGUCUUGUCUGUCUGGAUGA | 458-480 |
| AD-60179.1 | A-121911.1 | UUUGACCUCAUGGUGUUCGUU | 1174-1190_ | A-121912.1 | AACGAACACCAUGAGGUCAAAGG | 1172-1190_ |
| | | | G21U | | | G21U |
| AD-60180.1 | A-121927.1 | GGAUGCCAAGAACACUAUGAU | 4200-4220 | A-121928.1 | AUCAUAGUGUUCUUGGCAUCCUG | 4198-4220 |
| AD-60181.1 | A-121865.1 | AAGAAAGGGAUCUGUGUGGCA | 2500-2520 | A-121866.1 | UGCCACACAGAUCCCUUUCUUGU | 2498-2520 |
| AD-60182.1 | A-121881.1 | CAAGAAAGGGAUCUGUGUGGC | 2499-2519 | A-121882.1 | GCCACACAGAUCCCUUUCUUGUC | 2497-2519 |
| AD-60183.1 | A-121897.1 | UACGUGGUCAAGGUCUUCUCU | 3307-3327 | A-121898.1 | AGAGAAGACCUUGACCACGUAGG | 3305-3327 |
| AD-60184.1 | A-121913.1 | CAGUUUCGAGGUCAUAGUGGA | 756-776 | A-121914.1 | UCCACUAUGACCUCGAAACUGGG | 754-776 |
| AD-60185.1 | A-121929.1 | CGUGCCGGAAGGAAUCAGAAU | 2859-2879 | A-121930.1 | AUUCUGAUUCCUUCCGGCACGAC | 2857-2879 |
| AD-60186.1 | A-121867.1 | GAAAGGGAUCUGUGUGGCAGA | 2502-2522 | A-121868.1 | UCUGCCACACAGAUCCCUUUCUU | 2500-2522 |
| AD-60187.1 | A-121883.1 | GACAGACAAGACCAUCUACAA | 465-481_ | A-121884.1 | UUGUAGAUGGUCUUGUCUGUCUG | 463-481_ |
| | | | C21A | | | C21A |
| AD-60188.1 | A-121899.1 | UGACCUCAUGGUGUUCGUGAC | 1176-1196 | A-121900.1 | GUCACGAACACCAUGAGGUCAAA | 1174-1196 |
| AD-60189.1 | A-121915.1 | UGUAAUAAAUUCGACCUCAAG | 4138-4158 | A-121916.1 | CUUGAGGUCGAAUUUAUUACAGG | 4136-4158 |
| AD-60190.1 | A-121931.1 | AACUACAUGAACCUACAGAGA | 3601-3621 | A-121932.1 | UCUCUGUAGGUUCAUGUAGUUGG | 3599-3621 |

TABLE 6
C3 modified sequences

| | | Sense Sequence | | Antisense Sequence |
|---|---|---|---|---|
| | | (SEQ ID NOS 308-347, respectively, | Antisense | (SEQ ID NOS 348-388, respectively, |
| Duplex ID | Sense ID | in order of appearance) | ID | in order of appearance) |
| AD-60149.1 | A-121853.1 | CfsgsUfgGfuCfaAfGfGfuCfuUfcUfcUfcUfL96 | A-121854.1 | asGfsaGfaGfaAfgAfccuUfgAfcCfaCfgsusa |
| AD-60151.1 | A-121885.1 | AfscsGfuGfgUfcAfAfGfgUfcUfuCfuCfuAfL96 | A-121886.1 | usAfsgAfgAfaGfaCfcuuGfaCfcAfcGfusasg |
| AD-60152.1 | A-121901.1 | UfsusUfgAfcCfuCfAfUfgGfuGfuUfcGfuGfL96 | A-121902.1 | csAfscGfaAfcAfcCfaugAfgGfuCfaAfasgsg |
| AD-60153.1 | A-121917.1 | GfsgsAfgAfaUfuGfCfUfuCfaUfaCfaAfaAfL96 | A-121918.1 | usUfsuUfgUfaUfgAfagcAfaUfuCfuCfcsusc |
| AD-60154.1 | A-121933.1 | UfsgsUfuAfaAfuGfGfCfuGfaUfcCfuGfgAfL96 | A-121934.1 | usCfscAfgGfaUfcAfgccAfuUfuAfaCfasgsc |
| AD-60155.1 | A-121855.1 | GfsasCfaGfaCfaAfGfAfcCfaUfcUfaCfaCfL96 | A-121856.1 | gsUfsgUfaGfaUfgGfucuUfgUfcUfgUfcsusg |
| AD-60156.1 | A-121871.1 | CfscsAfgAfcAfgAfCfAfaGfaCfcAfuCfuAfL96 | A-121872.1 | usAfsgAfuGfgUfcUfuguCfuGfuCfuGfgsasu |
| AD-60157.1 | A-121887.1 | CfscsAfgAfuCfcAfCfUfuCfaCfcAfaGfaAfL96 | A-121888.1 | usUfscUfuGfgUfgAfaguGfgAfuCfuGfgsusa |
| AD-60158.1 | A-121903.1 | UfsusGfaCfcUfcAfUfGfgUfgUfuCfgUfgAfL96 | A-121904.1 | usCfsaCfgAfaCfaCfcauGfaGfgUfcAfasasg |
| AD-60159.1 | A-121919.1 | CfscsCfcUfuCfgAfGfGfuCfaCfaGfuAfaUfL96 | A-121920.1 | asUfsuAfcUfgUfgAfccuCfgAfaGfgGfgsusc |
| AD-60160.1 | A-121935.1 | AfsusGfaAfcAfaAfAfCfuGfuGfgCfuGfuUfL96 | A-121936.1 | asAfscAfgCfcAfcAfguuUfuGfuUfcAfususc |
| AD-60161.1 | A-121857.1 | AfsgsAfcAfgAfcAfAfGfaCfcAfuCfuAfcAfL96 | A-121858.1 | usGfsuAfgAfuGfgUfcuuGfuCfuGfuCfusgsg |
| AD-60162.1 | A-121873.1 | CfscsAfgAfuCfcAfCfUfuCfaCfcAfaGfaCfL96 | A-121874.1 | gsUfscUfuGfgUfgAfaguGfgAfuCfuGfgsusa |
| AD-60163.1 | A-121889.1 | AfsgsGfgAfuCfuGfUfGfuGfgCfaGfaCfcAfL96 | A-121890.1 | usGfsgUfcUfgCfcAfcacAfgAfuCfcCfususu |
| AD-60164.1 | A-121905.1 | GfsasCfaAfgAfcCfAfUfcUfaCfaCfcCfcUfL96 | A-121906.1 | asGfsgGfgUfgUfaGfaugGfuCfuUfgUfcsusg |
| AD-60165.1 | A-121921.1 | GfscsUfgAfgGfaGfAfAfuUfgCfuUfcAfuAfL96 | A-121922.1 | usAfsuGfaAfgCfaAfuucUfcCfuCfaGfcsasc |
| AD-60166.1 | A-121859.1 | AfscsGfuGfgUfcAfAfGfgUfcUfuCfuCfuCfL96 | A-121860.1 | gsAfsgAfgAfaGfaCfcuuGfaCfcAfcGfusasg |
| AD-60167.1 | A-121875.1 | GfsgsAfuCfuGfuGfUfGfgCfaGfaCfcCfcUfL96 | A-121876.1 | asGfsgGfgUfcUfgCfcacAfcAfgAfuCfcscsu |
| AD-60168.1 | A-121891.1 | AfscsAfgAfcAfaGfAfCfcAfuCfuAfcAfcAfL96 | A-121892.1 | usGfsuGfuAfgAfuGfgucUfuGfuCfuGfuscsu |
| AD-60169.1 | A-121907.1 | AfsusCfcAfgAfcAfGfAfcAfaGfaCfcAfuUfL96 | A-121908.1 | asAfsuGfgUfcUfuGfucuGfuCfuGfgAfusgsa |
| AD-60170.1 | A-121923.1 | CfsusCfcGfuGfuGfGfGfuGfgAfcGfuCfaAfL96 | A-121924.1 | usUfsgAfcGfuCfcAfcccAfcAfcGfgAfgsusc |
| AD-60171.1 | A-121861.1 | UfscsCfaGfaCfaGfAfCfaAfgAfcCfaUfcUfL96 | A-121862.1 | asGfsaUfgGfuCfuUfgucUfgUfcUfgGfasusg |
| AD-60172.1 | A-121877.1 | AfsgsGfgAfuCfuGfUfGfuGfgCfaGfaCfcCfL96 | A-121878.1 | gsGfsgUfcUfgCfcAfcacAfgAfuCfcCfususu |
| AD-60173.1 | A-121893.1 | CfsasAfgAfaAfgGfGfAfuCfuGfuGfuGfgAfL96 | A-121894.1 | usCfscAfcAfcAfgAfuccCfuUfuCfuUfgsusc |
| AD-60174.1 | A-121909.1 | UfsgsAfcCfuCfaUfGfGfuGfuUfcGfuGfaUfL96 | A-121910.1 | asUfscAfcGfaAfcAfccaUfgAfgGfuCfasasa |
| AD-60175.1 | A-121925.1 | GfscsAfgCfuAfaAfAfGfaCfuUfuGfaCfuUfL96 | A-121926.1 | asAfsgUfcAfaAfgUfcuuUfuAfgCfuGfcsasg |
| AD-60176.1 | A-121863.1 | CfsasUfcCfaGfaCfAfGfaCfaAfgAfcCfaUfL96 | A-121864.1 | asUfsgGfuCfuUfgUfcugUfcUfgGfaUfgsasa |
| AD-60177.1 | A-121879.1 | AfscsAfgAfcAfaGfAfCfcAfuCfuAfcAfcCfL96 | A-121880.1 | gsGfsuGfuAfgAfuGfgucUfuGfuCfuGfuscsu |
| AD-60178.1 | A-121895.1 | AfsusCfcAfgAfcAfGfAfcAfaGfaCfcAfuCfL96 | A-121896.1 | gsAfsuGfgUfcUfuGfucuGfuCfuGfgAfusgsa |
| AD-60179.1 | A-121911.1 | UfsusUfgAfcCfuCfAfUfgGfuGfuUfcGfuUfL96 | A-121912.1 | asAfscGfaAfcAfcCfaugAfgGfuCfaAfasgsg |
| AD-60180.1 | A-121927.1 | GfsgsAfuGfcCfaAfGfAfaCfaCfuAfuGfaUfL96 | A-121928.1 | asUfscAfuAfgUfgUfucuUfgGfcAfuCfcsusg |
| AD-60181.1 | A-121865.1 | AfsasGfaAfaGfgGfAfUfcUfgUfgUfgGfcAfL96 | A-121866.1 | usGfscCfaCfaCfaGfaucCfcUfuUfcUfusgsu |
| AD-60182.1 | A-121881.1 | CfsasAfgAfaAfgGfGfAfuCfuGfuGfuGfgCfL96 | A-121882.1 | gsCfscAfcAfcAfgAfuccCfuUfuCfuUfgsusc |
| AD-60183.1 | A-121897.1 | UfsasCfgUfgGfuCfAfAfgGfuCfuUfcUfcUfL96 | A-121898.1 | asGfsaGfaAfgAfcCfuugAfcCfaCfgUfasgsg |
| AD-60184.1 | A-121913.1 | CfsasGfuUfuCfgAfGfGfuCfaUfaGfuGfgAfL96 | A-121914.1 | usCfscAfcUfaUfgAfccuCfgAfaAfcUfgsgsg |
| AD-60185.1 | A-121929.1 | CfsgsUfgCfcGfgAfAfGfgAfaUfcAfgAfaUfL96 | A-121930.1 | asUfsuCfuGfaUfuCfcuuCfcGfgCfaCfgsasc |
| AD-60186.1 | A-121867.1 | GfsasAfaGfgGfaUfCfUfgUfgUfgGfcAfgAfL96 | A-121868.1 | usCfsuGfcCfaCfaCfagaUfcCfcUfuUfcsusu |
| AD-60187.1 | A-121883.1 | GfsasCfaGfaCfaAfGfAfcCfaUfcUfaCfaAfL96 | A-121884.1 | usUfsgUfaGfaUfgGfucuUfgUfcUfgUfcsusg |
| AD-60188.1 | A-121899.1 | UfsgsAfcCfuCfaUfGfGfuGfuUfcGfuGfaCfL96 | A-121900.1 | gsUfscAfcGfaAfcAfccaUfgAfgGfuCfasasa |
| AD-60189.1 | A-121915.1 | UfsgsUfaAfuAfaAfUfUfcGfaCfcUfcAfaGfL96 | A-121916.1 | csUfsuGfaGfgUfcGfaauUfuAfuUfaCfasgsg |
| AD-60190.1 | A-121931.1 | AfsasCfuAfcAfuGfAfAfcCfuAfcAfgAfgAfL96 | A-121932.1 | usCfsuCfuGfuAfgGfuucAfuGfuAfgUfusgsg |

TABLE 7
C9 unmodified sequences

| | | Sense Seqeunce | | | Antisense Seqeunce | |
|---|---|---|---|---|---|---|
| | | (SEQ ID NOS 389-411, | | | (SEQ ID NOS 412-434, | |
| | | respectively, in | Position in | | respectively, in | Position in |
| Duplex ID | Sense ID | order of appearance) | NM_001737.3 | Antisense ID | order of appearance) | NM_001737.3 |
| AD-59663.1 | A-121046.1 | UUUUGACAAUGAGUUCUACAA | 606-626 | A-121047.1 | UUGUAGAACUCAUUGUCAAAAGG | 604-626 |
| AD-59664.1 | A-121062.1 | AUCAAUGAAUUUAGUGUAAGA | 1597-1617 | A-121063.1 | UCUUACACUAAAUUCAUUGAUAU | 1595-1617 |
| AD-59665.1 | A-121078.1 | AGACAAAUGUUUCGUUCAAGA | 268-288 | A-121079.1 | UCUUGAACGAAACAUUUGUCUGA | 266-288 |
| AD-59668.1 | A-121048.1 | CUUUUGACAAUGAGUUCUACA | 605-625 | A-121049.1 | UGUAGAACUCAUUGUCAAAAGGU | 603-625 |
| AD-59669.1 | A-121064.1 | AACUUGGAAAGAGCCAUUGAAx | 1570-1590 | A-121065.1 | UUCAAUGGCUCUUUCCAAGUUUU | 1568-1590 |
| AD-59670.1 | A-121080.1 | UACCUGAGAAGCUGAUUAACAx | 2589-2609 | A-121081.1 | UGUUAAUCAGCUUCUCAGGUAGG | 2587-2609 |
| AD-59673.1 | A-121050.1 | ACCUUUUGACAAUGAGUUCUA | 603-623 | A-121051.1 | UAGAACUCAUUGUCAAAAGGUGU | 601-623 |
| AD-59674.1 | A-121066.1 | GACUGCGGAAAUGACUUUCAA | 391-411 | A-121067.1 | UUGAAAGUCAUUUCCGCAGUCAU | 389-411 |
| AD-59675.1 | A-121082.1 | GCCCAUUCAAAUUUGAGGGAA | 1682-1702 | A-121083.1 | UUCCCUCAAAUUUGAAUGGGCAG | 1680-1702 |
| AD-59678.1 | A-121052.1 | UUUUGGAUAAAGCUUCCAUGA | 1175-1195 | A-121053.1 | UCAUGGAAGCUUUAUCCAAAACA | 1173-1195 |
| AD-59679.1 | A-121068.1 | AACCAAAGGCGAGAAAAAUUU | 708-728 | A-121069.1 | AAAUUUUUCUCGCCUUUGGUUUC | 706-728 |
| AD-59680.1 | A-121084.1 | CUUUGCCAACUACCUAUGAAA | 1067-1087 | A-121085.1 | UUUCAUAGGUAGUUGGCAAAGCU | 1065-1087 |
| AD-59683.1 | A-121054.1 | CACCUUUUGACAAUGAGUUCU | 602-622 | A-121055.1 | AGAACUCAUUGUCAAAAGGUGUG | 600-622 |
| AD-59684.1 | A-121070.1 | GAGAAGACAUCAAAUUUUAAU | 781-801 | A-121071.1 | AUUAAAAUUUGAUGUCUUCUCUU | 779-801 |
| AD-59685.1 | A-121086.1 | GACAAUGAGUUCUACAAUGGA | 610-630 | A-121087.1 | UCCAUUGUAGAACUCAUUGUCAA | 608-630 |
| AD-59688.1 | A-121056.1 | UUUGGAUAAAGCUUCCAUGAA | 1176-1196 | A-121057.1 | UUCAUGGAAGCUUUAUCCAAAAC | 1174-1196 |
| AD-59689.1 | A-121072.1 | AUCUAUGAAACCAAAGGCGAG | 700-720 | A-121073.1 | CUCGCCUUUGGUUUCAUAGAUCA | 698-720 |
| AD-59690.1 | A-121088.1 | AUAUCAAUGAAUUUAGUGUAA | 1595-1615 | A-121089.1 | UUACACUAAAUUCAUUGAUAUAG | 1593-1615 |
| AD-59692.1 | A-121058.1 | CACACCUUUUGACAAUGAGUU | 600-620 | A-121059.1 | AACUCAUUGUCAAAAGGUGUGCU | 598-620 |
| AD-59693.1 | A-121074.1 | UAGGGUCUGAGACCUUUUGAA | 2648-2668 | A-121075.1 | UUCAAAAGGUCUCAGACCCUAAG | 2646-2668 |
| AD-59694.1 | A-121090.1 | CAAAACUUGGAAAGAGCCAUU | 1567-1587 | A-121091.1 | AAUGGCUCUUUCCAAGUUUUGUU | 1565-1587 |
| AD-59696.1 | A-121060.1 | GCACACCUUUUGACAAUGAGUx | 599-619 | A-121061.1 | ACUCAUUGUCAAAAGGUGUGCUU | 597-619 |
| AD-59697.1 | A-121076.1 | UGAAACCAAAGGCGAGAAAAA | 705-725 | A-121077.1 | UUUUUCUCGCCUUUGGUUUCAUA | 703-725 |

TABLE 8
C9 modified sequences

| | | Sense Sequence | | Antisense Sequence |
|---|---|---|---|---|
| | | (SEQ ID NOS 435-457, respectively, | | (SEQ ID NOS 458-480, respectively, |
| Duplex ID | Sense ID | in order of appearance) | Antisense ID | in order of appearance) |
| AD-59663.1 | A-121046.1 | UfsusUfuGfaCfaAfUfGfaGfuUfcUfaCfaAfL96 | A-121047.1 | usUfsgUfaGfaAfcUfcauUfgUfcAfaAfasgsg |
| AD-59664.1 | A-121062.1 | AfsusCfaAfuGfaAfUfUfuAfgUfgUfaAfgAfL96 | A-121063.1 | usCfsuUfaCfaCfuAfaauUfcAfuUfgAfusasu |
| AD-59665.1 | A-121078.1 | AfsgsAfcAfaAfuGfUfUfuCfgUfuCfaAfgAfL96 | A-121079.1 | usCfsuUfgAfaCfgAfaacAfuUfuGfuCfusgsa |
| AD-59668.1 | A-121048.1 | CfsusUfuUfgAfcAfAfUfgAfgUfuCfuAfcAfL96 | A-121049.1 | usGfsuAfgAfaCfuCfauuGfuCfaAfaAfgsgsu |
| AD-59669.1 | A-121064.1 | AfsasCfuUfgGfaAfAfGfaGfcCfaUfuGfaAfL96 | A-121065.1 | usUfscAfaUfgGfcUfcuuUfcCfaAfgUfususu |
| AD-59670.1 | A-121080.1 | UfsasCfcUfgAfgAfAfGfcUfgAfuUfaAfcAfL96 | A-121081.1 | usGfsuUfaAfuCfaGfcuuCfuCfaGfgUfasgsg |
| AD-59673.1 | A-121050.1 | AfscsCfuUfuUfgAfCfAfaUfgAfgUfuCfuAfL96 | A-121051.1 | usAfsgAfaCfuCfaUfuguCfaAfaAfgGfusgsu |
| AD-59674.1 | A-121066.1 | GfsasCfuGfcGfgAfAfAfuGfaCfuUfuCfaAfL96 | A-121067.1 | usUfsgAfaAfgUfcAfuuuCfcGfcAfgUfcsasu |
| AD-59675.1 | A-121082.1 | GfscsCfcAfuUfcAfAfAfuUfuGfaGfgGfaAfL96 | A-121083.1 | usUfscCfcUfcAfaAfuuuGfaAfuGfgGfcsasg |
| AD-59678.1 | A-121052.1 | UfsusUfuGfgAfuAfAfAfgCfuUfcCfaUfgAfL96 | A-121053.1 | usCfsaUfgGfaAfgCfuuuAfuCfcAfaAfascsa |
| AD-59679.1 | A-121068.1 | AfsasCfcAfaAfgGfCfGfaGfaAfaAfaUfuUfL96 | A-121069.1 | asAfsaUfuUfuUfcUfcgcCfuUfuGfgUfususc |
| AD-59680.1 | A-121084.1 | CfsusUfuGfcCfaAfCfUfaCfcUfaUfgAfaAfL96 | A-121085.1 | usUfsuCfaUfaGfgUfaguUfgGfcAfaAfgscsu |
| AD-59683.1 | A-121054.1 | CfsasCfcUfuUfuGfAfCfaAfuGfaGfuUfcUfL96 | A-121055.1 | asGfsaAfcUfcAfuUfgucAfaAfaGfgUfgsusg |
| AD-59684.1 | A-121070.1 | GfsasGfaAfgAfcAfUfCfaAfaUfuUfuAfaUfL96 | A-121071.1 | asUfsuAfaAfaUfuUfgauGfuCfuUfcUfcsusu |
| AD-59685.1 | A-121086.1 | GfsasCfaAfuGfaGfUfUfcUfaCfaAfuGfgAfL96 | A-121087.1 | usCfscAfuUfgUfaGfaacUfcAfuUfgUfcsasa |
| AD-59688.1 | A-121056.1 | UfsusUfgGfaUfaAfAfGfcUfuCfcAfuGfaAfL96 | A-121057.1 | usUfscAfuGfgAfaGfcuuUfaUfcCfaAfasasc |
| AD-59689.1 | A-121072.1 | AfsusCfuAfuGfaAfAfCfcAfaAfgGfcGfaGfL96 | A-121073.1 | csUfscGfcCfuUfuGfguuUfcAfuAfgAfuscsa |
| AD-59690.1 | A-121088.1 | AfsusAfuCfaAfuGfAfAfuUfuAfgUfgUfaAfL96 | A-121089.1 | usUfsaCfaCfuAfaAfuucAfuUfgAfuAfusasg |
| AD-59692.1 | A-121058.1 | CfsasCfaCfcUfuUfUfGfaCfaAfuGfaGfuUfL96 | A-121059.1 | asAfscUfcAfuUfgUfcaaAfaGfgUfgUfgscsu |
| AD-59693.1 | A-121074.1 | UfsasGfgGfuCfuGfAfGfaCfcUfuUfuGfaAfL96 | A-121075.1 | usUfscAfaAfaGfgUfcucAfgAfcCfcUfasasg |
| AD-59694.1 | A-121090.1 | CfsasAfaAfcUfuGfGfAfaAfgAfgCfcAfuUfL96 | A-121091.1 | asAfsuGfgCfuCfuUfuccAfaGfuUfuUfgsusu |
| AD-59696.1 | A-121060.1 | GfscsAfcAfcCfuUfUfUfgAfcAfaUfgAfgUfL96 | A-121061.1 | asCfsuCfaUfuGfuCfaaaAfgGfuGfuGfcsusu |
| AD-59697.1 | A-121076.1 | UfsgsAfaAfcCfaAfAfGfgCfgAfgAfaAfaAfL96 | A-121077.1 | usUfsuUfuCfuCfgCfcuuUfgGfuUfuCfasusa |

TABLE 9
CFB single dose screen in Hep3B Cells

| | 10 nM | 0.1 nM | 10 nM SD | 0.1 nM SD |
|---|---|---|---|---|
| AD-60315.1 | 22.82 | 17.15 | 20.03 | 9.73 |
| AD-60326.1 | 9.33 | 17.49 | 0.29 | 4.75 |
| AD-60303.1 | 8.45 | 28.08 | 4.67 | 10.75 |
| AD-60331.1 | 14.47 | 29.99 | 4.36 | 4.99 |
| AD-60344.1 | 17.61 | 30.59 | 6.96 | 1.70 |
| AD-60345.1 | 8.98 | 33.88 | 0.65 | 7.11 |
| AD-60319.1 | 14.36 | 33.98 | 1.17 | 12.16 |
| AD-60308.1 | 12.64 | 34.07 | 0.19 | 11.41 |
| AD-60332.1 | 20.19 | 35.92 | 3.53 | 3.23 |
| AD-60313.1 | 23.94 | 38.26 | 19.92 | 13.16 |
| AD-60321.1 | 13.32 | 46.50 | 4.83 | 1.00 |
| AD-60327.1 | 18.44 | 50.40 | 6.45 | 5.21 |
| AD-60302.1 | 13.82 | 53.31 | 4.21 | 12.46 |
| AD-60325.1 | 11.73 | 54.59 | 0.27 | 15.34 |
| AD-60337.1 | 16.17 | 56.04 | 3.64 | 33.50 |
| AD-60333.1 | 17.72 | 65.14 | 2.22 | 8.79 |
| AD-60314.1 | 27.79 | 67.44 | 2.02 | 9.10 |
| AD-60320.1 | 18.12 | 85.78 | 5.39 | 33.24 |
| AD-60339.1 | 20.86 | 88.73 | 9.59 | 10.47 |
| AD-60338.1 | 18.14 | 91.03 | 4.11 | 10.07 |
| AD-60307.1 | 21.76 | 91.13 | 3.49 | 43.21 |
| AD-60309.1 | 20.64 | 95.13 | 0.34 | 53.77 |
| AD-60343.1 | 61.82 | 112.57 | 5.56 | 17.11 |
| AD-60324.1 | 24.20 | 81.08 | 3.41 | 18.95 |
| AD-60318.1 | 43.11 | 99.07 | 13.83 | 17.69 |
| AD-60300.1 | 35.21 | 111.33 | 5.35 | 12.86 |
| AD-60330.1 | 58.80 | 111.85 | 8.86 | 32.76 |
| AD-60306.1 | 85.87 | 113.97 | 12.01 | 33.11 |
| AD-60336.1 | 35.90 | 119.80 | 3.75 | 4.92 |
| AD-60301.1 | 28.95 | 121.90 | 7.73 | 23.23 |
| AD-60342.1 | 49.16 | 123.56 | 17.53 | 14.88 |
| AD-60334.1 | 26.12 | 55.28 | 22.52 | 7.86 |
| AD-60304.1 | 20.62 | 74.38 | 4.43 | 16.50 |
| AD-60310.1 | 18.93 | 77.08 | 0.87 | 35.20 |
| AD-60328.1 | 63.55 | 86.20 | 1.91 | 4.07 |
| AD-60322.1 | 81.67 | 86.30 | 21.22 | 25.58 |
| AD-60316.1 | 105.01 | 93.22 | 8.55 | 14.39 |
| AD-60346.1 | 109.11 | 99.09 | 2.07 | 25.51 |
| AD-60335.1 | 42.63 | 101.00 | 5.91 | 54.15 |
| AD-60323.1 | 81.31 | 103.20 | 4.03 | 3.86 |
| AD-60340.1 | 50.41 | 109.25 | 20.73 | 1.67 |
| AD-60305.1 | 30.06 | 114.59 | 5.00 | 17.97 |
| AD-60317.1 | 102.87 | 126.87 | 1.95 | 30.25 |
| AD-60329.1 | 106.30 | 131.90 | 0.20 | 53.49 |
| AD-60341.1 | 112.98 | 137.99 | 3.94 | 31.92 |
| AD-60311.1 | 162.39 | 140.07 | 10.04 | 63.65 |

TABLE 10
CFB single dose screen in Primary Mouse Hepatocytes

| | Avg 10 nM | Avg 0.1 nM | 10 nM SD | 0.1 nM SD |
|---|---|---|---|---|
| AD-60302.1 | 112.73 | 109.72 | 15.29 | 1.75 |
| AD-60303.1 | 119.44 | 102.70 | 0.15 | 23.82 |
| AD-60307.1 | 67.92 | 99.67 | 2.91 | 6.47 |
| AD-60308.1 | 116.89 | 111.68 | 12.15 | 4.51 |
| AD-60309.1 | 100.72 | 112.85 | 10.72 | 4.84 |
| AD-60313.1 | 50.21 | 102.05 | 10.08 | 4.13 |
| AD-60314.1 | 74.12 | 113.15 | 4.99 | 12.59 |
| AD-60315.1 | 101.22 | 104.79 | 6.07 | 29.27 |
| AD-60319.1 | 18.56 | 81.28 | 4.22 | 6.27 |
| AD-60320.1 | 103.08 | 123.28 | 8.71 | 18.51 |
| AD-60321.1 | 45.03 | 104.98 | 3.91 | 25.35 |
| AD-60325.1 | 121.99 | 127.67 | 4.63 | 24.72 |
| AD-60326.1 | 55.24 | 102.10 | 4.66 | 13.35 |
| AD-60327.1 | 79.42 | 108.21 | 4.77 | 21.99 |
| AD-60331.1 | 4.51 | 52.03 | 0.35 | 8.06 |
| AD-60332.1 | 115.05 | 120.93 | 6.06 | 4.00 |
| AD-60333.1 | 102.19 | 113.88 | 0.38 | 31.81 |
| AD-60337.1 | 3.93 | 31.08 | 1.12 | 0.49 |
| AD-60338.1 | 120.85 | 115.74 | 9.02 | 8.93 |
| AD-60339.1 | 16.97 | 75.02 | 0.27 | 10.17 |
| AD-60343.1 | 126.10 | 131.79 | 24.11 | 14.66 |
| AD-60344.1 | 8.06 | 35.14 | 0.31 | 11.86 |
| AD-60345.1 | 132.64 | 133.75 | 7.96 | 27.82 |
| AD-60300.1 | 27.05 | 81.40 | 8.63 | 8.86 |
| AD-60301.1 | 10.24 | 72.49 | 0.46 | 5.41 |
| AD-60306.1 | 97.07 | 114.32 | 4.87 | 18.27 |
| AD-60318.1 | 37.73 | 98.00 | 3.09 | 7.56 |
| AD-60324.1 | 42.83 | 99.93 | 1.21 | 12.09 |
| AD-60330.1 | 70.05 | 116.47 | 1.46 | 15.23 |
| AD-60336.1 | 31.97 | 95.19 | 13.63 | 1.75 |
| AD-60342.1 | 38.22 | 108.31 | 4.90 | 6.76 |
| AD-60304.1 | 7.88 | 18.03 | 3.57 | 18.03 |
| AD-60305.1 | 13.09 | 64.61 | 2.19 | 11.26 |
| AD-60310.1 | 1.36 | 21.17 | 0.24 | 1.27 |
| AD-60311.1 | 2.11 | 28.70 | 0.22 | 4.79 |
| AD-60316.1 | 2.23 | 28.29 | 1.11 | 4.66 |
| AD-60317.1 | 60.25 | 84.11 | 5.23 | 5.66 |
| AD-60322.1 | 70.53 | 115.47 | 1.47 | 11.72 |
| AD-60323.1 | 108.71 | 117.31 | 17.38 | 7.90 |
| AD-60328.1 | 4.04 | 38.52 | 0.21 | 10.03 |
| AD-60329.1 | 6.73 | 36.47 | 0.21 | 8.72 |
| AD-60334.1 | 49.74 | 99.41 | 2.74 | 8.64 |
| AD-60335.1 | 34.99 | 99.57 | 3.64 | 1.59 |
| AD-60340.1 | 99.13 | 106.94 | 5.71 | 9.81 |
| AD-60341.1 | 92.74 | 112.17 | 0.34 | 8.10 |
| AD-60346.1 | 5.65 | 53.30 | 0.52 | 5.28 |

TABLE 11
CFB Dose response screen in Hep 3B cells

| Duplex ID | Hep3B IC50(nM) |
|---|---|
| AD-60303.1 | 0.119 |
| AD-60326.1 | 0.062 |
| AD-60319.1 | 0.351 |
| AD-60331.1 | 0.225 |
| AD-60337.1 | 0.418 |
| AD-60344.1 | 0.347 |
| AD-60304.1 | >10 |
| AD-60324.1 | 7.039 |

TABLE 12
CFB Dose response screen
in Primary Mouse Hepatocytes

| | PrimaryMouse |
|---|---|
| Duplex ID | IC50(nM) |
| AD-60303.1 | Not achieved |
| AD-60326.1 | 4.063 |
| AD-60319.1 | 0.162 |
| AD-60331.1 | 0.031 |
| AD-60337.1 | 0.014 |
| AD-60344.1 | 0.003 |
| AD-60304.1 | 0.028 |
| AD-60324.1 | 0.854 |

TABLE 13
C9 Single dose screen in Primary Mouse Hepatocytes

| | Avg | Avg | SD | SD 0.1 |
|---|---|---|---|---|
| Duplex ID | 10 nM | 0.1 nM | 10 nM | nM |
| AD-59663.1 | 5.92 | 27.33 | 2.13 | 16.40 |
| AD-59664.1 | 83.71 | 76.56 | 42.80 | 21.75 |
| AD-59665.1 | 91.76 | 85.56 | 20.62 | 26.31 |
| AD-59668.1 | 30.66 | 49.06 | 4.23 | 13.47 |
| AD-59669.1 | 95.36 | 64.74 | 18.69 | 19.30 |
| AD-59670.1 | 96.91 | 103.65 | 26.38 | 7.23 |
| AD-59673.1 | 22.34 | 31.20 | 7.34 | 20.44 |
| AD-59674.1 | 12.16 | 45.36 | 5.13 | 14.79 |
| AD-59675.1 | 93.18 | 109.59 | 3.77 | 8.45 |
| AD-59678.1 | 47.33 | 47.23 | 14.22 | 6.86 |
| AD-59679.1 | 98.53 | 30.06 | 12.88 | 32.30 |
| AD-59680.1 | 33.75 | 86.68 | 1.20 | 28.07 |
| AD-59683.1 | 25.81 | 44.31 | 9.78 | 23.12 |
| AD-59684.1 | 58.89 | 96.75 | 16.45 | 21.05 |
| AD-59685.1 | 68.90 | 115.36 | 8.17 | 6.36 |
| AD-59688.1 | 32.69 | 41.63 | 6.49 | 21.72 |
| AD-59689.1 | 86.86 | 102.46 | 24.47 | 0.38 |
| AD-59690.1 | 101.98 | 131.95 | 4.87 | 0.16 |
| AD-59692.1 | 33.98 | 36.81 | 9.73 | 3.38 |
| AD-59693.1 | 84.70 | 75.60 | 35.91 | 16.09 |
| AD-59694.1 | 108.88 | 132.73 | 2.53 | 45.43 |
| AD-59696.1 | 32.87 | 45.82 | 9.72 | 15.79 |
| AD-59697.1 | 110.00 | 120.20 | 1.21 | 3.98 |
| AD-1955 | 109.44 | 92.04 | 24.08 | 32.14 |
| AD-1955 | 105.93 | 104.33 | 4.54 | 6.01 |
| AD-1955 | 87.62 | 93.01 | 6.11 | 3.30 |
| AD-1955 | 90.95 | 117.91 | 3.90 | 29.31 |
| AD-1955 | 91.04 | 93.49 | 6.80 | 8.35 |
| AD-1955 | 106.63 | 107.78 | 1.44 | 9.89 |
| AD-1955 | 95.33 | 82.10 | 9.45 | 2.92 |
| AD-1955 | 123.15 | 121.27 | 44.13 | 11.42 |

TABLE 14
C3 Single dose screen in Primary Mouse Hepatocytes

| | Avg | Avg 0.1 | 10 nM | 0.1 nM |
|---|---|---|---|---|
| Duplex ID | 10 nM | nM | SD | SD |
| AD-60149.1 | 0.08 | 33.89 | 0.04 | 44.73 |
| AD-60151.1 | 0.11 | 81.49 | 0.14 | 7.88 |
| AD-60152.1 | 1.72 | 92.02 | 0.89 | 9.34 |
| AD-60153.1 | 93.57 | 97.06 | 17.16 | 4.16 |
| AD-60154.1 | 97.73 | 122.73 | 0.66 | 28.17 |
| AD-60155.1 | 12.94 | 91.38 | 17.39 | 9.28 |
| AD-60156.1 | 8.02 | 41.58 | 9.16 | 56.27 |
| AD-60157.1 | 23.61 | 98.22 | 33.22 | 8.77 |
| AD-60158.1 | 0.75 | 77.42 | 0.76 | 8.61 |
| AD-60159.1 | 100.47 | 93.53 | 11.61 | 7.44 |
| AD-60160.1 | 89.34 | 92.97 | 18.42 | 9.21 |
| AD-60161.1 | 2.33 | 82.37 | 0.32 | 21.06 |
| AD-60162.1 | 60.59 | 46.83 | 1.37 | 65.96 |
| AD-60163.1 | 104.09 | 53.32 | 5.42 | 75.38 |
| AD-60164.1 | 61.13 | 40.41 | 5.57 | 57.13 |
| AD-60165.1 | 61.93 | 86.61 | 4.44 | 11.53 |
| AD-60166.1 | 2.27 | 96.48 | 0.70 | 17.52 |
| AD-60167.1 | 87.51 | 84.41 | 3.70 | 9.19 |
| AD-60168.1 | 35.16 | 98.47 | 0.28 | 20.95 |
| AD-60169.1 | 0.42 | 51.78 | 0.13 | 18.79 |
| AD-60170.1 | 125.00 | 99.12 | 1.46 | 12.72 |
| AD-60171.1 | 0.44 | 59.53 | 0.01 | 1.82 |
| AD-60172.1 | 89.05 | 102.11 | 4.20 | 10.62 |
| AD-60173.1 | 81.29 | 95.39 | 16.08 | 3.86 |
| AD-60174.1 | 0.06 | 25.26 | 0.02 | 31.64 |
| AD-60175.1 | 0.89 | 80.59 | 0.23 | 6.61 |
| AD-60176.1 | 0.88 | 52.71 | 0.02 | 6.12 |
| AD-60177.1 | 63.14 | 85.00 | 16.41 | 9.25 |
| AD-60178.1 | 42.97 | 64.33 | 4.75 | 14.00 |
| AD-60179.1 | 0.12 | 54.36 | 0.01 | 6.05 |
| AD-60180.1 | 94.57 | 98.11 | 13.68 | 5.65 |
| AD-60181.1 | 69.28 | 85.66 | 6.99 | 31.48 |
| AD-60182.1 | 84.22 | 79.05 | 2.63 | 8.99 |
| AD-60183.1 | 0.08 | 44.17 | 0.05 | 7.27 |
| AD-60184.1 | 80.50 | 81.13 | 9.59 | 14.73 |
| AD-60185.1 | 92.21 | 99.75 | 12.00 | 2.32 |
| AD-60186.1 | 60.60 | 93.85 | 18.81 | 29.73 |
| AD-60187.1 | 2.33 | 71.77 | 0.20 | 1.49 |
| AD-60188.1 | 0.33 | 78.13 | 0.37 | 14.56 |
| AD-60189.1 | 57.75 | 91.38 | 43.16 | 14.16 |
| AD-60190.1 | 29.40 | 94.84 | 41.57 | 7.55 |
| AD-1955 | 103.85 | 90.86 | 8.96 | 3.45 |
| AD-1955 | 71.27 | 115.36 | 36.17 | 13.40 |
| AD-1955 | 99.16 | 95.85 | 5.16 | 8.09 |
| AD-1955 | 112.29 | 104.37 | 3.65 | 12.88 |
| AD-1955 | 108.44 | 97.01 | 1.40 | 0.36 |
| AD-1955 | 118.26 | 109.90 | 2.10 | 12.76 |
| AD-1955 | 98.09 | 98.72 | 11.81 | 1.81 |

TABLE 15
C3 Single dose screen in Hep 3B cells

| | Avg | Avg | 10 nM | 0.1 nM |
|---|---|---|---|---|
| Duplex ID | 10 nM | 0.1 nM | SD | SD |
| AD-60149.1 | 7.49 | 55.90 | 7.75 | 4.41 |
| AD-60151.1 | 24.05 | 101.65 | 14.22 | 8.27 |
| AD-60152.1 | 16.58 | 112.51 | 10.66 | 19.82 |
| AD-60153.1 | 20.13 | 22.40 | 22.87 | 3.76 |
| AD-60154.1 | 24.21 | 112.90 | 8.93 | 25.58 |
| AD-60155.1 | 20.48 | 68.97 | 2.10 | 1.73 |
| AD-60156.1 | 18.22 | 66.39 | 0.80 | 1.67 |
| AD-60157.1 | 29.07 | 125.72 | 5.80 | 8.08 |
| AD-60158.1 | 81.03 | 105.18 | 14.03 | 14.20 |
| AD-60159.1 | 27.58 | 92.91 | 4.77 | 2.22 |
| AD-60160.1 | 11.49 | 60.48 | 4.68 | 11.60 |
| AD-60161.1 | 27.49 | 80.57 | 10.88 | 16.13 |
| AD-60162.1 | 49.58 | 89.22 | 3.76 | 6.06 |
| AD-60163.1 | 91.18 | 99.19 | 5.14 | 21.40 |
| AD-60164.1 | 33.93 | 85.93 | 4.07 | 1.00 |
| AD-60165.1 | 5.54 | 13.05 | 0.43 | 2.69 |
| AD-60166.1 | 35.21 | 81.66 | 21.31 | 14.48 |
| AD-60167.1 | 106.64 | 115.02 | 8.09 | 39.17 |
| AD-60168.1 | 26.91 | 92.99 | 2.50 | 5.86 |
| AD-60169.1 | 10.66 | 49.63 | 6.66 | 17.36 |
| AD-60170.1 | 52.73 | 104.43 | 2.71 | 22.03 |
| AD-60171.1 | 23.77 | 60.35 | 7.94 | 7.27 |
| AD-60172.1 | 143.57 | 99.22 | 8.09 | 11.58 |
| AD-60173.1 | 100.25 | 108.80 | 12.25 | 44.49 |
| AD-60174.1 | 16.68 | 92.68 | 0.45 | 45.25 |
| AD-60175.1 | 24.94 | 42.14 | 4.74 | 7.68 |
| AD-60176.1 | 17.30 | 66.19 | 8.83 | 13.81 |
| AD-60177.1 | 50.71 | 116.18 | 20.19 | 1.49 |
| AD-60178.1 | 22.65 | 90.84 | 5.82 | 15.23 |
| AD-60179.1 | 15.21 | 85.30 | 3.55 | 23.07 |
| AD-60180.1 | 45.91 | 93.35 | 16.19 | 28.54 |
| AD-60181.1 | 63.50 | 109.82 | 10.07 | 14.56 |
| AD-60182.1 | 110.82 | 121.62 | 1.09 | 6.78 |
| AD-60183.1 | 13.82 | 69.24 | 8.64 | 3.35 |
| AD-60184.1 | 26.47 | 97.94 | 9.64 | 9.88 |
| AD-60185.1 | 41.42 | 103.45 | 7.77 | 2.47 |
| AD-60186.1 | 72.24 | 88.39 | 6.37 | 51.31 |
| AD-60187.1 | 9.49 | 51.15 | 3.28 | 11.65 |
| AD-60188.1 | 55.44 | 95.66 | 7.05 | 30.36 |
| AD-60189.1 | 52.59 | 89.41 | 4.25 | 20.79 |
| AD-60190.1 | 16.67 | 95.38 | 1.22 | 11.83 |

TABLE 16
C3 Dose response screen in
primary mouse hepatocytes

| | PMH |
|---|---|
| Duplex ID | IC50(nM) |
| AD-60149.1 | 0.03 |
| AD-60152.1 | 1.03 |
| AD-60156.1 | 0.19 |
| AD-60165.1 | 1.96 |
| AD-60169.1 | 0.04 |
| AD-60171.1 | 0.04 |
| AD-60174.1 | 0.01 |
| AD-60175.1 | 0.54 |
| AD-60176.1 | 0.05 |
| AD-60179.1 | 0.03 |
| AD-60183.1 | 0.03 |
| AD-60187.1 | 0.24 |

TABLE 17
C3 Dose response
screen in Hep3B cells

| | Hep3B |
|---|---|
| Duplex ID | IC50(nM) |
| AD-60149.1 | 0.88 |
| AD-60152.1 | 2.87 |
| AD-60156.1 | 2.06 |
| AD-60165.1 | 0.08 |
| AD-60169.1 | 0.41 |
| AD-60171.1 | 5.51 |
| AD-60174.1 | 2.60 |
| AD-60175.1 | 0.48 |
| AD-60176.1 | 2.29 |
| AD-60179.1 | 1.70 |
| AD-60183.1 | 0.94 |
| AD-60187.1 | 1.65 |

### Example 3. In Vivo Screening

[0873] A subset of three CFB GalNAC conjugated iRNAs was selected for further in vivo evaluation, AD-60304, AD-60331, and AD-60344. The nucleotide sequences of the sense and antisens strands of these iRNA agents are provided in Table 18. As indicated in Table 19, the nucleotide sequence of AD-60304 is a perfect match to the mouse and rat nucleotide sequences. The nucleotide sequence of AD-60331 and the nucleotide sequence of AD-60344 have nucleotide mismatches (“MM”; see bolded, underlined nucleotides) to the mouse gene but have activity in mouse hepatocytes.

[0874] C57BL/6 mice (N=3 per group) were injected subcutaneously with either 1 mg/kg or 10 mg/kg of GalNAc conjugated duplexes or an equal volume of 1× Dulbecco's Phosphate-Buffered Saline (DPBS) (Life Technologies, Cat #14040133). Ninety-six hours later, mice were euthanized and the livers were dissected and flash frozen in liquid nitrogen. Livers were ground in a 2000 Geno/Grinder (SPEX SamplePrep, Metuchen, NJ). Approximately 10 mg of liver powder per sample was used for RNA isolation. Samples were first homogenized in a TissueLyserII (Qiagen Inc, Valencia, CA) and then RNA was extracted using a RNeasy 96 Universal Tissue Kit (Qiagen Inc, Cat #74881) following manufacturer's protocol using vacuum/spin technology. RNA concentration was measured by a NanoDrop 8000 (Thermo Scientific, Wilmington, DE) and was adjusted to 100 ng/μl. cDNA was prepared and RT-PCR were performed as described above.

[0875] FIG. 2 demonstrates the efficacy of the CFB iRNAs to inhibit CFB mRNA at a dose of either 1 mg/kg or 10 mg/kg. At the 10 mg/kg dose, an average of about 80% silencing was observed for all three iRNAs tested. At the 1 mg/kg dose, an average of about 30% silencing was observed for AD-60331 and AD-60344.

[0876] The ability of AD-60331 to suppress expression of CFB mRNA in vivo was also assessed using a single dose of 1.25 mg/kg, 2.5 mg/kg, and 10 mg/kg. C57BL/6 mice were injected subcutaneously with the foregoing doses and seventy hours later, mice were euthanized. RNA isolation form the livers of the animals, cDNA preparation, and RT-PCR were performed as described above. FIG. 3 demonstrates that AD-60331 reduces CFB mRNA in a dose responsive manner, with an ED₅₀ of about 2.5 mg/kg. It is expected that when introduced into human subjects, these iRNAs will be even more effective given the design of the sequences.

TABLE 18

| | Sense Sequence | Antisense Sequence | |
|---|---|---|---|
| | (SEQ ID NOS 481-483, | (SEQ ID NOS 484-486, | |
| | respectively, in | respectively, in | |
| Duplex | order of appearance) | order of appearance) | species |
| AD-60304.1 | GfsasUfuGfaGfaAfGfGfu | usAfsaCfuCfgCfcAfccu | MR |
| | GfgCfgAfgUfuAfL96 | UfcUfcAfaUfcsasa | |
| AD-60331.1 | AfsgsCfaAfcAfuGfUfGfu | usGfsaCfuUfuGfaAfcac | HC |
| | UfcAfaAfgUfcAfL96 | AfuGfuUfgCfuscsa | |
| AD-60344.1 | GfscsUfgUfgGfuGfUfCfu | asAfsaGfuAfcUfcAfgac | HC |
| | GfaGfuAfcUfuUfL96 | AfcCfaCfaGfcscsc | |

TABLE 19

| | Antisense MM to mouse | Antisense MM to rat | | |
|---|---|---|---|---|
| | (bold, underline) | (bold, underline) | | |
| | (SEQ ID NOS 487-489, | (SEQ ID NOS 490-492, | Primary | |
| | respectively, in | respectively ,in | Mouse | Hep3b |
| Duplex | order of appearance) | order of appearance) | IC50(nM) | IC50(nM) |
| AD-60304.1 | UAACUCGCCACCUUCUCAAUCAA | UAACUCGCCACCUUCUCAAUCAA | 0.028 | 2.876 |
| AD-60331.1 | UGACUUUGAACACAUGUUGCUCA | UGACUUUGAACACAUGUUGCUCA | 0.031 | 0.225 |
| AD-60344.1 | AAAGUACUCAGACACCACAGCCC | AAAGUACUCAGACACCACAGCCC | 0.017 | 0.347 |

We claim:

1. A double stranded ribonucleic acid (dsRNA) agent selected from the group consisting of
(a) a dsRNA agent for inhibiting expression of complement factor B (CFB) in a cell, wherein said dsRNA agent comprises a sense strand and an antisense strand, wherein said sense strand comprises at least 15 contiguous nucleotides differing by no more than 3 nucleotides from any one of the nucleotide sequence of SEQ ID NOs: 1-5, 27, and 30, and said antisense strand comprises at least 15 contiguous nucleotides differing by no more than 3 nucleotides from any one of the nucleotide sequence of SEQ ID NOs: 12-16, 33, and 36;
(b) a dsRNA agent for inhibiting expression of complement factor B (CFB) in a cell, wherein said dsRNA comprises a sense strand and an antisense strand, the antisense strand comprising a region of complementarity which comprises at least 15 contiguous nucleotides differing by no more than 3 nucleotides from any one of the antisense sequences listed in Table 3 and 4;
(c) a dsRNA agent for inhibiting expression of complement component C3 in a cell, wherein said dsRNA comprises a sense strand and an antisense strand, the antisense strand comprising a region of complementarity which comprises at least 15 contiguous nucleotides differing by no more than 3 nucleotides from any one of the antisense sequences listed in Table 5 and 6;
(d) a dsRNA agent for inhibiting expression of complement component C3 in a cell, wherein said dsRNA agent comprises a sense strand and an antisense strand, wherein said sense strand comprises at least 15 contiguous nucleotides differing by no more than 3 nucleotides from any one of the nucleotide sequence of SEQ ID NOs: 6-8, 28, and 31, and said antisense strand comprises at least 15 contiguous nucleotides differing by no more than 3 nucleotides from any one of the nucleotide sequence of SEQ ID NOs: 17-19, 34, and 37;
(e) a dsRNA agent for inhibiting expression of complement component C9 in a cell, wherein said dsRNA comprises a sense strand and an antisense strand, wherein said sense strand comprises at least 15 contiguous nucleotides differing by no more than 3 nucleotides from any one of the nucleotide sequence of SEQ ID NOs: 9-11, 29, and 32, and said antisense strand comprises at least 15 contiguous nucleotides differing by no more than 3 nucleotides from any one of the nucleotide sequence of SEQ ID NOs: 20-22, 35, and 38; and
(f) a dsRNA agent for inhibiting expression of complement component C9 in a cell, wherein said dsRNA agent comprises a sense strand and an antisense strand, the antisense strand comprising a region of complementarity which comprises at least 15 contiguous nucleotides differing by no more than 3 nucleotides from any one of the antisense sequences listed in Table 7 and 8; and
wherein the sense strand and the antisense strand form a double stranded region,
wherein the dsRNA agent comprises at least one modified nucleotide, and
a ligand.

2. The dsRNA agent of claim 1, wherein the dsRNA agent is selected from the group consisting of the dsRNA agents listed in any one of Tables 3, 4, 5, 6, 7 or 8.

3. The dsRNA agent of claim 1, wherein the modifications on the nucleotides are selected from the group consisting of LNA, CRN, CET, UNA, HNA, CeNA, 2′-methoxyethyl, 2′-O-methyl, 2′-O-alkyl, 2′-O-allyl, 2′-C-allyl, 2′-fluoro, 2′-deoxy, 2′-hydroxyl, and combinations thereof.

4. The dsRNA agent of claim 1, wherein the ligand is one or more GalNAc derivatives attached through a linker.

5. The dsRNA agent of claim 1, wherein the ligand is

[chemical structure]

6. The dsRNA agent of claim 1, wherein the ligand is attached to the 3′ end of the sense strand.

7. The dsRNA agent of claim 1, wherein the agent further comprises at least one phosphorothioate or methylphosphonate internucleotide linkage.

8. The dsRNA agent of claim 1, wherein the double-stranded region is 15-30 nucleotide pairs in length, 17-23 nucleotide pairs in length, 17-25 nucleotide pairs in length, 23-27 nucleotide pairs in length, 19-21 nucleotide pairs in length, or 21-23 nucleotide pairs in length.

9. The dsRNA agent of claim 1, wherein each strand is independently 15-30 nucleotides in length.

10. The dsRNA agent of claim 10, wherein the RNAi agent is conjugated to the ligand as shown in the following schematic

[chemical structure]

11. A double stranded RNAi agent for inhibiting expression of complement factor B (CFB) in a cell,
wherein said double stranded RNAi agent comprises a sense strand and an antisense strand forming a double stranded region,
wherein said sense strand comprises at least 15 contiguous nucleotides of the nucleotide sequence of any one of SEQ ID NOs: 1-5, 27, and 30, and said antisense strand comprises at least 15 contiguous nucleotides of the nucleotide sequence of any one of SEQ ID NOs: 12-16, 33, and 36,
wherein substantially all of the nucleotides of said sense strand comprise a modification selected from the group consisting of a 2′-O-methyl modification and a 2′-fluoro modification,
wherein said sense strand comprises two phosphorothioate internucleotide linkages at the 5′-terminus,
wherein substantially all of the nucleotides of said antisense strand comprise a modification selected from the group consisting of a 2′-O-methyl modification and a 2′-fluoro modification,
wherein said antisense strand comprises two phosphorothioate internucleotide linkages at the 5′-terminus and two phosphorothioate internucleotide linkages at the 3′-terminus, and
wherein said sense strand is conjugated to one or more GalNAc derivatives attached through a branched bivalent or trivalent linker at the 3′-terminus.

12. A double stranded RNAi agent for inhibiting expression of complement component C3 in a cell,
wherein said double stranded RNAi agent comprises a sense strand and an antisense strand forming a double stranded region,
wherein said sense strand comprises at least 15 contiguous nucleotides of the nucleotide sequence of any one of SEQ ID NOs: 6-8, 28, and 31, and said antisense strand comprises at least 15 contiguous nucleotides of the nucleotide sequence of any one of SEQ ID NOs: 17-19, 34, and 37,
wherein substantially all of the nucleotides of said sense strand comprise a modification selected from the group consisting of a 2′-O-methyl modification and a 2′-fluoro modification,
wherein said sense strand comprises two phosphorothioate internucleotide linkages at the 5′-terminus,
wherein substantially all of the nucleotides of said antisense strand comprise a modification selected from the group consisting of a 2′-O-methyl modification and a 2′-fluoro modification,
wherein said antisense strand comprises two phosphorothioate internucleotide linkages at the 5′-terminus and two phosphorothioate internucleotide linkages at the 3′-terminus, and
wherein said sense strand is conjugated to one or more GalNAc derivatives attached through a branched bivalent or trivalent linker at the 3′-terminus.

13. A double stranded RNAi agent for inhibiting expression of complement component C9 in a cell,
wherein said double stranded RNAi agent comprises a sense strand and an antisense strand forming a double stranded region,
wherein said sense strand comprises at least 15 contiguous nucleotides of the nucleotide sequence of any one of SEQ ID NOs: 9-11, 29, and 32, and said antisense strand comprises at least 15 contiguous nucleotides of the nucleotide sequence of any one of SEQ ID NOs: 20-22, 35, and 38,
wherein substantially all of the nucleotides of said sense strand comprise a modification selected from the group consisting of a 2′-O-methyl modification and a 2′-fluoro modification,
wherein said sense strand comprises two phosphorothioate internucleotide linkages at the 5′-terminus,
wherein substantially all of the nucleotides of said antisense strand comprise a modification selected from the group consisting of a 2′-O-methyl modification and a 2′-fluoro modification,
wherein said antisense strand comprises two phosphorothioate internucleotide linkages at the 5′-terminus and two phosphorothioate internucleotide linkages at the 3′-terminus, and
wherein said sense strand is conjugated to one or more GalNAc derivatives attached through a branched bivalent or trivalent linker at the 3′-terminus.

14. The double stranded RNAi agent of claim 1, wherein all of the nucleotides of the sense strand and all of the nucleotides of the antisense strand comprise a nucleotide modification.

15. A cell containing the double stranded RNAi agent of claim 1.

16. A pharmaceutical composition selected from the group consisting of:
(a) a pharmaceutical composition for inhibiting expression of a complement component factor B gene comprising the agent of claim 1;
(b) a pharmaceutical composition for inhibiting expression of a complement component C3 gene comprising the agent of any one of claim 1; and
(c) a pharmaceutical composition for inhibiting expression of a complement component C9 gene comprising the agent of any one of claim 1.

17. A method of inhibiting complement factor B (CFB) expression in a cell, the method comprising:
(a) contacting the cell with the agent of claim 1; and
(b) maintaining the cell produced in step (a) for a time sufficient to obtain degradation of the mRNA transcript of a CFB gene, thereby inhibiting expression of the CFB gene in the cell.

18. A method of inhibiting complement component 3 (C3) expression in a cell, the method comprising:
(a) contacting the cell with the agent of claim 1; and
(b) maintaining the cell produced in step (a) for a time sufficient to obtain degradation of the mRNA transcript of a C3 gene, thereby inhibiting expression of the C3 gene in the cell.

19. A method of inhibiting complement component 9 (C9) expression in a cell, the method comprising:
(a) contacting the cell with the agent of any one of claim 1; and
(b) maintaining the cell produced in step (a) for a time sufficient to obtain degradation of the mRNA transcript of a C9 gene, thereby inhibiting expression of the C9 gene in the cell.

The application's sequence listing, which the Patent Office published only in electronic form, follows.

SEQUENCE LISTING (492 sequences)

SEQ ID NO: 1 - DNA, 2646 bp, Homo sapiens
  source 1..2646: mol_type = genomic DNA
gacttctgcagtttctgtttccttgactggcagctcagcggggccctcccgcttggatgttccgggaaagtgatgtgggtaggacaggcggggcgagccgcaggtgccagaacacagattgtataaaaggctgggggctggtggggagcaggggaagggaatgtgaccaggtctaggtctggagtttcagcttggacactgagccaagcagacaagcaaagcaagccaggacacaccatcctgccccaggcccagcttctctcctgccttccaacgccatggggagcaatctcagcccccaactctgcctgatgccctttatcttgggcctcttgtctggaggtgtgaccaccactccatggtctttggcccggccccagggatcctgctctctggagggggtagagatcaaaggcggctccttccgacttctccaagagggccaggcactggagtacgtgtgtccttctggcttctacccgtaccctgtgcagacacgtacctgcagatctacggggtcctggagcaccctgaagactcaagaccaaaagactgtcaggaaggcagagtgcagagcaatccactgtccaagaccacacgacttcgagaacggggaatactggccccggtctccctactacaatgtgagtgatgagatctctttccactgctatgacggttacactctccggggctctgccaatcgcacctgccaagtgaatggccgatggagtgggcagacagcgatctgtgacaacggagcggggtactgctccaacccgggcatccccattggcacaaggaaggtgggcagccagtaccgccttgaagacagcgtcacctaccactgcagccgggggcttaccctgcgtggctcccagcggcgaacgtgtcaggaaggtggctcttggagcgggacggagccttcctgccaagactccttcatgtacgacacccctcaagaggtggccgaagctttcctgtcttccctgacagagaccatagaaggagtcgatgctgaggatgggcacggcccaggggaacaacagaagcggaagatcgtcctggacccttcaggctccatgaacatctacctggtgctagatggatcagacagcattggggccagcaacttcacaggagccaaaaagtgtctagtcaacttaattgagaaggtggcaagttatggtgtgaagccaagatatggtctagtgacatatgccacataccccaaaatttgggtcaaagtgtctgaagcagacagcagtaatgcagactgggtcacgaagcagctcaatgaaatcaattatgaagaccacaagttgaagtcagggactaacaccaagaaggccctccaggcagtgtacagcatgatgagctggccagatgacgtccctcctgaaggctggaaccgcacccgccatgtcatcatcctcatgactgatggattgcacaacatgggcggggacccaattactgtcattgatgagatccgggacttgctatacattggcaaggatcgcaaaaacccaagggaggattatctggatgtctatgtgtttggggtcgggcctttggtgaaccaagtgaacatcaatgctttggcttccaagaaagacaatgagcaacatgtgttcaaagtcaaggatatggaaaacctggaagatgttttctaccaaatgatcgatgaaagccagtctctgagtctctgtggcatggtttgggaacacaggaagggtaccgattaccacaagcaaccatggcaggccaagatctcagtcattcgcccttcaaagggacacgagagctgtatgggggctgtggtgtctgagtactttgtgctgacagcagcacattgtttcactgtggatgacaaggaacactcaatcaaggtcagcgtaggaggggagaagcgggacctggagatagaagtagtcctatttcaccccaactacaacattaatgggaaaaaagaagcaggaattcctgaattttatgactatgacgttgccctgatcaagctcaagaataagctgaaatatggccagactatcaggcccatttgtctcccctgcaccgagggaacaactcgagctttgaggcttcctccaactaccacttgccagcaacaaaaggaagagctgctccctgcacaggatatcaaagctctgtttgtgtctgaggaggagaaaaagctgactcggaaggaggtctacatcaagaatggggataagaaaggcagctgtgagagagatgctcaatatgccccaggctatgacaaagtcaaggacatctcagaggtggtcacccctcggttcctttgtactggaggagtgagtccctatgctgaccccaatacttgcagaggtgattctggcggccccttgatagttcacaagagaagtcgtttcattcaagttggtgtaatcagctggggagtagtggatgtctgcaaaaaccagaagcggcaaaagcaggtacctgctcacgcccgagactttcacatcaacctctttcaagtgctgccctggctgaaggagaaactccaagatgaggatttgggttttctataaggggtttcctgctggacaggggcgtgggattgaattaaaacagctgcgacaacaaaaaaaaaaaaaaaaaaaa

SEQ ID NO: 2 - DNA, 2767 bp, Mus musculus
  source 1..2767: mol_type = genomic DNA
gctccatcacacagtccatggaaagactgatcttttaaattgggggtagtggaggtggtggtctgtgcttgttaggaggggtctgggggctaagagggagctttgaaagggaagttctggcccttggtcagtcaagggtggggctcacatagtttctgtttcctcagttggcagttcagctggggccctccttcatgaatgttccgggaagcagtggctgcgtgcgcagggtaggctggccaggctgcagatgccagagcagattgcataaaaggttaggggacagtgggaaaggggtgtagccagatccagcatttgggtttcagtttggacaggaggtcaaataggcacccagagtgacctggagagggctttgggccactggactctctggtgctttccatgacaatggagagcccccagctctgcctcgtcctcttggtcttaggcttctcctctggaggtgtgagcgcaactccagtgcttgaggcccggccccaagtctcctgctctctggagggagtagagatcaaaggcggctcctttcaacttctccaaggcggtcaggccctggagtacctatgtccctctggcttctacccataccccgtgcagactcgaacctgcagatccacaggctcctggagcgacctgcagacccgagaccaaaagattgtccagaaggcggaatgcagagcaatacgctgcccacgaccgcaggactttgaaaatggggaattctggccccggtcccccttctacaacctgagtgaccagatttcttttcaatgctatgatggttacgttctccggggctctgctaatcgcacctgccaagagaatggccggtgggatgggcaaacagcaatttgtgatgatggagctggatactgtcccaatcccggtattcctattgggacaaggaaggtgggtagccaataccgccttgaagacattgttacttaccactgcagccggggacttgtcctgcgtggctcccagaagcgaaagtgtcaagaaggtggctcatggagtgggacagagccttcctgccaagattccttcatgtatgacagccctcaagaagtggccgaagcattcctatcctccctgacagagaccatcgaaggagccgatgctgaggatgggcacagcccaggagaacagcagaagaggaagattgtcctagacccctcgggctccatgaatatctacctggtgctagatggatcagacagcatcggaagcagcaacttcacaggggctaagcggtgcctcaccaacttgattgagaaggtggcgagttacggggtgaggccacgatatggtctcctgacatatgctacagtccccaaagtgttggtcagagtgtctgatgagaggagtagcgatgccgactgggtcacagagaagctcaaccaaatcagttatgaagaccacaagctgaagtcagggaccaacaccaagagggctctccaggctgtgtatagcatgatgagctgggcaggggatgccccgcctgaaggctggaatagaacccgccatgtcatcatcattatgactgatggcttgcacaacatgggtggaaaccctgtcactgtcattcaggacatccgagccttgctggacatcggcagggatcccaaaaatcccagggaggattacctggatgtgtatgtgtttggggtcgggcctctggtggactccgtgaacatcaatgccttagcttccaaaaaggacaatgagcatcatgtgtttaaagtcaaggatatggaagacctggagaatgttttctaccaaatgattgatgaaaccaaatctctgagtctctgtggcatggtgtgggagcataaaaaaggcaacgattatcataagcaaccatggcaagccaagatctcagtcactcgccctctgaaaggacatgagacctgtatgggggccgtggtgtctgagtacttcgtgctgacagcagcgcactgcttcatggtggatgatcagaaacattccatcaaggtcagcgtggggggtcagaggcgggacctggagattgaagaggtcctgttccaccccaaatacaatattaatgggaaaaaggcagaagggatccctgagttctatgattatgatgtggccctagtcaagctcaagaacaagctcaagtatggccagactctcaggcccatctgtctcccctgcacggagggaaccacacgagccttgaggcttcctcagacagccacctgcaagcagcacaaggaacagttgctccctgtgaaggatgtcaaagctctgtttgtatctgagcaagggaagagcctgactcggaaggaggtgtacatcaagaatggggacaagaaagccagttgtgagagagatgctacaaaggcccaaggctatgagaaggtcaaagatgcctctgaggtggtcactccacggttcctctgcacaggaggggtggatccctatgctgaccccaacacatgcaaaggagattccgggggccctctcattgttcacaagagaagccgcttcattcaagttggtgtgattagctggggagtagtagatgtctgcagagaccagaggcggcaacagctggtaccctcttatgcccgggacttccacatcaacctcttccaggtgctgccctggctaaaggacaagctcaaagatgaggatttgggttttctataaagagcttcctgcagggagagtgtgaggacagattaaagcagttacaataacaaaaaaaaaaaaaaaaaaaaaa

SEQ ID NO: 3 - DNA, 2763 bp, Mus musculus
  source 1..2763: mol_type = genomic DNA
gctccatcacacagtccatggaaagactgatcttttaaattgggggtagtggaggtggtggtctgtgcttgttaggaggggtctgggggctaagagggagctttgaaagggaagttctggcccttggtcagtcaagggtggggctcacatagtttctgtttcctcagttggcagttcagctggggccctccttcatgaatgttccgggaagcagtggctgcgtgcgcagggtaggctggccaggctgcagatgccagagcagattgcataaaaggttaggggacagtgggaaaggggtgtagccagatccagcatttgggtttcagtttggacaggaggtcaaataggcacccagagtgacctggagagggctttgggccactggactctctggtgctttccatgacaatggagagcccccagctctgcctcgtcctcttggtcttaggcttctcctctggaggtgtgagcgcaactccagtgcttgaggcccggccccaagtctcctgctctctggagggagtagagatcaaaggcggctcctttcaacttctccaaggcggtcaggccctggagtacctatgtccctctggcttctacccataccccgtgcagactcgaacctgcagatccacaggctcctggagcgacctgcagacccgagaccaaaagattgtccagaaggcggaatgcagagcaatacgctgcccacgaccgcaggactttgaaaatggggaattctggccccggtcccccttctacaacctgagtgaccagatttcttttcaatgctatgatggttacgttctccggggctctgctaatcgcacctgccaagagaatggccggtgggatgggcaaacagcaatttgtgatgatggagctggatactgtcccaatcccggtattcctattgggacaaggaaggtgggtagccaataccgccttgaagacattgttacttaccactgcagccggggacttgtcctgcgtggctcccagaagcgaaagtgtcaagaaggtggctcatggagtgggacagagccttcctgccaagattccttcatgtatgacagccctcaagaagtggccgaagcattcctatcctccctgacagagaccatcgaaggagccgatgctgaggatgggcacagcccaggagaacagcagaagaggaagattgtcctagacccctcgggctccatgaatatctacctggtgctagatggatcagacagcatcggaagcagcaacttcacaggggctaagcggtgcctcaccaacttgattgagaaggtggcgagttacggggtgaggccacgatatggtctcctgacatatgctacagtccccaaagtgttggtcagagtgtctgatgagaggagtagcgatgccgactgggtcacagagaagctcaaccaaatcagttatgaagaccacaagctgaagtcagggaccaacaccaagagggctctccaggctgtgtatagcatgatgagctgggcaggggatgccccgcctgaaggctggaatagaacccgccatgtcatcatcattatgactgatggcttgcacaacatgggtggaaaccctgtcactgtcattcaggacatccgagccttgctggacatcggcagggatcccaaaaatcccagggaggattacctggatgtgtatgtgtttggggtcgggcctctggtggactccgtgaacatcaatgccttagcttccaaaaaggacaatgagcatcatgtgtttaaagtcaaggatatggaagacctggagaatgttttctaccaaatgattgatgaaaccaaatctctgagtctctgtggcatggtgtgggagcataaaaaaggcaacgattatcataagcaaccatggcaagccaagatctcagtcactcgccctctgaaaggacatgagacctgtatgggggccgtggtgtctgagtacttcgtgctgacagcagcgcactgcttcatggtggatgatcagaaacattccatcaaggtcagcgtggggggtcagaggcgggacctggagattgaagaggtcctgttccaccccaaatacaatattaatgggaaaaaggcagaagggatccctgagttctatgattatgatgtggccctagtcaagctcaagaacaagctcaagtatggccagactctcaggcccatctgtctcccctgcacggagggaaccacacgagccttgaggcttcctcagacagccacctgcaagcagcacaaggaacagttgctccctgtgaaggatgtcaaagctctgtttgtatctgagcaagggaagagcctgactcggaaggaggtgtacatcaagaatggggacaagccagttgtgagagagatgctacaaaggcccaaggctatgagaaggtcaaagatgcctctgaggtggtcactccacggttcctctgcacaggaggggtggatccctatgctgaccccaacacatgcaaaggagattccgggggccctctcattgttcacaagagaagccgcttcattcaagttggtgtgattagctggggagtagtagatgtctgcagagaccagaggcggcaacagctggtaccctcttatgcccgggacttccacatcaacctcttccaggtgctgccctggctaaaggacaagctcaaagatgaggatttgggttttctataaagagcttcctgcagggagagtgtgaggacagattaaagcagttacaataacaaaaaaaaaaaaaaaaaaaaaa

SEQ ID NO: 4 - DNA, 2573 bp, Rattus norvegicus
  source 1..2573: mol_type = genomic DNA
cagcaggggccctccttcatgaatgttccgggaagcagcgtctgtgcagggtaggttggccaggctgcaggtgccagagcagattgcataaaaggttaggggccggtgggaaaggggtgtagccagatccagcactggagtttcagtctggacagcaagtcaagtagccacccagagtgaactggaaagggcttttggccacgggctttccatgacaatggagggtccccagctctgcttagtcctcttggtcttaggcctctcctccggaggtgtgagcgcaactccagtgcttgaggcccggccccaggtctcttgctctctggagggagtagagatcaaaggcggctccttccaacttctccaagacggtcaggccctggagtacctgtgtccctctggcttctacccataccctgtgcagactcgaacctgcaaatccacaggctcctggagtgtcctccagacccgggaccaaaagattgtcaagaaggcagaatgcagagcaatacgctgcccacgaccacaggactttgaaaatggggagttctggccccggtccccctactacaacctgagtgatcagatttcttttcaatgctatgatggctacactctccggggctctgctaatcgcacctgccaagagaatggccggtgggatgggcaaacagcaatctgtgatgatggagcgggatactgtcccaacccgggtattcctattgggacaaggaaggtgggaagccagtaccgtcttgaagacactgtcacttaccactgtagtcggggacttgtcctacgtggctcccagcagcgaaggtgccaggaaggtggctcgtggagtgggacagagccttcctgccaagattccttcatgtacgacagccctcaagaggtggccgaagcatttctatcctccctgacagagaccatcgaaggagcagatgcggaggatgggcacagcccaggggaacagcagaagaggaagattatcctggacccctcgggctccatgaatatctacatggtgctggatggatccgacagcatcggggccagcaacttcacaggggccaagcggtgtctcgccaacttgattgagaaggtggcgagttatggggtgaagccaagatacggtctagtgacatatgccacagtccccaaagtcttggtcagagtgtctgaggagaggagtagtgatgccgactgggtcacagagaagctcaaccaaatcagttatgaagaccacaagctgaagtcagggaccaacaccaagaaggctctccaggctgtatacagcatgatgagctggccaggggatgctccgcctgaaggctggaatcgaacccgccacgtcatcatcatcatgactgatggcttgcacaacatgggtggagaccctgtcactgtcattgaggacatccgagacttgctggatattggcagggatcgcaaaaatccccgggaggattatttggatgtgtatgtgtttggggtcgggcctctggtggaccctgtgaacatcaatgccttggcttccaaaaagaacaatgagcagcatgtgttcaaggtcaaggacatggaggatctggagaacgtcttctacaaaatgatcgatgaaaccaaatctctgggtctctgtggcatggtgtgggagcatcagaaaggcggtgattattacaagcaaccatggcaagccaagatctcagtcactcgtcctctgaaaggacatgagaactgtatgggggccgtggtgtccgagtacttcgtgctgacagcagcgcattgcttcacagtggaagatcagaaacactccatcaaggtcaacgtggaggggaaaaggcgggacctggagattgaagaggtcctgttccaccctaattacgacatcaatgggaaaaaggcagaaggaatctctgagttctatgactatgatgttgccctcatcaagctcaagaccaagctgaagtacagccagactctcaggcccatctgtctcccctgcacagagggaaccacccgagccttgcggcttcctcagacagccacctgcaaacagcacaaggaagagttgctccctatgaaggacgtcaaagctctgtttgtatccgaggaagggaagaagctgacccggaaggaggtgtacatcaagaatggggaaaagaaagccagttgtgagagagatgctacaaaggcccaaggctatgagaaggtcaaagttgcctctgaggtggtcacccccaggttcctgtgcaccggaggggtagatccctatgctgaccccaacacatgcaaaggagactccgggggccctctcattgttcacaagagaagccgcttcattcaagttggtgtgatcagctggggagtagtggatgtctgcaaagacccgaggcggcaacagttggtgccctcctatgcccgggacttccacatcaatctcttccaggtgctgccctggctaaaggagaagctcaaagacgaggacttgggtttcttataaggagcttcctgctgggagggtgagggcagattaaagcagctacaatacaaatacaaaaaaaaaaaaaaaa

SEQ ID NO: 5 - DNA, 2334 bp, Pan troglodytes
  source 1..2334: mol_type = genomic DNA
cccaggcccagcttctctcctgccttccaacgccatggggagcaatctcagcccccaactctgcctgatgcccttcatcttgggcctcttgtctggaggtgtgaccaccactccatggcctttggcccagccccaggaatcctgctctctggagggggtagagatcaaaggcggctccttccgacttctccaagagggccaggcactggagtacgtgtgtccttctggcttctacccgtaccctgtgcagacacgtacctgcagatctacggggtcctggagcaccctgaagactcaagtccaaaagactgtcaggaaggcagagtgcagagcaatccactgtccaagaccacacgacttcgagaacggggaatactggccccggtctccctactacaatgtgagtgatgagatctctttccactgctatgacggttacactctccggggctctgccaatcgcacctgccaagtgaatggccggtggagtgggcagacagcgatctgtgacaacggagcggggtactgctccaacccgggcatccccattggcacaaggaaggtgggcagccagtaccgccttgaagacagcgtcacctaccactgcagccgggggcttaccctgcgtggctcccagcggcgaacgtgtcaggaaggtggctcttggagcgggacggagccttcttgccaagactccttcatgtacgacacccctcaagaggtggccgaagctttcctgtcttccctgacagagaccatagaaggagtcgatgctgaggatgggcacggcccaggggaacaacagaagcggaagatcgtcctggacccttcaggctccatgaacatctacctggtgctagatggatcagacagcattggggccagcaacttcacaggagccaaaaagtgtctagtcaacttaattgagaaggtggcaagttatggtgtgaagccaagatatggtctagtgacatatgccacacaccccaaaatttgggtcaaagtgtctgatccagacagcagtaatgcagactgggtcacgaagcagctcaatgaaatcaattatgaagaccacaagttgaagtcagggactaacaccaagaaggccctccaggcagtgtacagcatgatgagctggccagatgacatccctcctgaaggctggaaccgcacccgccatgtcatcatcctcatgactgatggattgcacaacatgggcggggacccaattactgtcattgatgagatccgggacttgctatacattggcaaggatcgcaaaaacccaagggaggattatctggatgtctatgtgtttggggtcgggcctttggtgaaccaagtgaacatcaatgctttggcttccaagaaagacaatgagcaacatgtgttcaaagtcaaggatatggaaaacctggaagatgttttctaccaaatgattgatgaaagccagtctctgagtctctgtggcatggtttgggaacacaggaagggtaccgattaccacaagcaaccatggcaagccaagatctcagtcattcgcccttcaaagggacacgagagctgtatgggggctgtggtgtctgagtactttgtgctgacagcagcacactgtttcactgtggatgacaaggaacactcaatcaaggtcagcgtaggaggggagaagcgggacctggagatagaagtagtcctatttcaccccaactacaacattaatgggaaaaaagcagcaggaattcctgaattttatgactatgacgttgccctgatcaagctcaagaataagctgaaatatggccagactatcaggcccatttgtctcccctgcaccgagggaacaactcgagctttgaggcttcctccaactaccacttgccagcaacaaaaggaagagctgctccctgcacaggatatcaaagctctgtttgtgtctgaggaggagaaaaagctgactcggaaggaggtctacatcaagaatggggataagaaaggcagctgtgagagagatgctcaatatgccccaggctatgacaaagtcaaggacatctcagaggtggtcacccctcggttcctttgtactggaggagtgagtccctatgctgaccccaatacttgcagaggtgattctggcggccccttgatagttcacaaaagaagtcgtttcattcaagttggtgtaatcagctggggagtagtggatgtctgcaaaaaccagaagcggcaaaagcaggtacctgctcacgcccgagactttcacatcaacctctttcaagtgctgccctggctgaaggagaaactccaagatgaggatttgggttttctataaggggt

SEQ ID NO: 6 - DNA, 5101 bp, Homo sapiens
  source 1..5101: mol_type = genomic DNA
cactcctccccatcctctccctctgtccctctgtccctctgaccctgcactgtcccagcaccatgggacccacctcaggtcccagcctgctgctcctgctactaacccacctccccctggctctggggagtcccatgtactctatcatcacccccaacatcttgcggctggagagcgaggagaccatggtgctggaggcccacgacgcgcaaggggatgttccagtcactgttactgtccacgacttcccaggcaaaaaactagtgctgtccagtgagaagactgtgctgacccctgccaccaaccacatgggcaacgtcaccttcacgatcccagccaacagggagttcaagtcagaaaaggggcgcaacaagttcgtgaccgtgcaggccaccttcgggacccaagtggtggagaaggtggtgctggtcagcctgcagagcgggtacctcttcatccagacagacaagaccatctacacccctggctccacagttctctatcggatcttcaccgtcaaccacaagctgctacccgtgggccggacggtcatggtcaacattgagaacccggaaggcatcccggtcaagcaggactccttgtcttctcagaaccagcttggcgtcttgcccttgtcttgggacattccggaactcgtcaacatgggccagtggaagatccgagcctactatgaaaactcaccacagcaggtcttctccactgagtttgaggtgaaggagtacgtgctgcccagtttcgaggtcatagtggagcctacagagaaattctactacatctataacgagaagggcctggaggtcaccatcaccgccaggttcctctacgggaagaaagtggagggaactgcctttgtcatcttcgggatccaggatggcgaacagaggatttccctgcctgaatccctcaagcgcattccgattgaggatggctcgggggaggttgtgctgagccggaaggtactgctggacggggtgcagaacccccgagcagaagacctggtggggaagtctttgtacgtgtctgccaccgtcatcttgcactcaggcagtgacatggtgcaggcagagcgcagcgggatccccatcgtgacctctccctaccagatccacttcaccaagacacccaagtacttcaaaccaggaatgccctttgacctcatggtgttcgtgacgaaccctgatggctctccagcctaccgagtccccgtggcagtccagggcgaggacactgtgcagtctctaacccagggagatggcgtggccaaactcagcatcaacacacaccccagccagaagcccttgagcatcacggtgcgcacgaagaagcaggagctctcggaggcagagcaggctaccaggaccatgcaggctctgccctacagcaccgtgggcaactccaacaattacctgcatctctcagtgctacgtacagagctcagacccggggagaccctcaacgtcaacttcctcctgcgaatggaccgcgcccacgaggccaagatccgctactacacctacctgatcatgaacaagggcaggctgttgaaggcgggacgccaggtgcgagagcccggccaggacctggtggtgctgcccctgtccatcaccaccgacttcatcccttccttccgcctggtggcgtactacacgctgatcggtgccagcggccagagggaggtggtggccgactccgtgtgggtggacgtcaaggactcctgcgtgggctcgctggtggtaaaaagcggccagtcagaagaccggcagcctgtacctgggcagcagatgaccctgaagatagagggtgaccacggggcccgggtggtactggtggccgtggacaagggcgtgttcgtgctgaataagaagaacaaactgacgcagagtaagatctgggacgtggtggagaaggcagacatcggctgcaccccgggcagtgggaaggattacgccggtgtcttctccgacgcagggctgaccttcacgagcagcagtggccagcagaccgcccagagggcagaacttcagtgcccgcagccagccgcccgccgacgccgttccgtgcagctcacggagaagcgaatggacaaagtcggcaagtaccccaaggagctgcgcaagtgctgcgaggacggcatgcgggagaaccccatgaggttctcgtgccagcgccggacccgtttcatctccctgggcgaggcgtgcaagaaggtcttcctggactgctgcaactacatcacagagctgcggcggcagcacgcgcgggccagccacctgggcctggccaggagtaacctggatgaggacatcattgcagaagagaacatcgtttcccgaagtgagttcccagagagctggctgtggaacgttgaggacttgaaagagccaccgaaaaatggaatctctacgaagctcatgaatatatttttgaaagactccatcaccacgtgggagattctggctgtgagcatgtcggacaagaaagggatctgtgtggcagaccccttcgaggtcacagtaatgcaggacttcttcatcgacctgcggctaccctactctgttgttcgaaacgagcaggtggaaatccgagccgttctctacaattaccggcagaaccaagagctcaaggtgagggtggaactactccacaatccagccttctgcagcctggccaccaccaagaggcgtcaccagcagaccgtaaccatcccccccaagtcctcgttgtccgttccatatgtcatcgtgccgctaaagaccggcctgcaggaagtggaagtcaaggctgctgtctaccatcatttcatcagtgacggtgtcaggaagtccctgaaggtcgtgccggaaggaatcagaatgaacaaaactgtggctgttcgcaccctggatccagaacgcctgggccgtgaaggagtgcagaaagaggacatcccacctgcagacctcagtgaccaagtcccggacaccgagtctgagaccagaattctcctgcaagggaccccagtggcccagatgacagaggatgccgtcgacgcggaacggctgaagcacctcattgtgaccccctcgggctgcggggaacagaacatgatcggcatgacgcccacggtcatcgctgtgcattacctggatgaaacggagcagtgggagaagttcggcctagagaagcggcagggggccttggagctcatcaagaaggggtacacccagcagctggccttcagacaacccagctctgcctttgcggccttcgtgaaacgggcacccagcacctggctgaccgcctacgtggtcaaggtcttctctctggctgtcaacctcatcgccatcgactcccaagtcctctgcggggctgttaaatggctgatcctggagaagcagaagcccgacggggtcttccaggaggatgcgcccgtgatacaccaagaaatgattggtggattacggaacaacaacgagaaagacatggccctcacggcctttgttctcatctcgctgcaggaggctaaagatatttgcgaggagcaggtcaacagcctgccaggcagcatcactaaagcaggagacttccttgaagccaactacatgaacctacagagatcctacactgtggccattgctggctatgctctggcccagatgggcaggctgaaggggcctcttcttaacaaatttctgaccacagccaaagataagaaccgctgggaggaccctggtaagcagctctacaacgtggaggccacatcctatgccctcttggccctactgcagctaaaagactttgactttgtgcctcccgtcgtgcgttggctcaatgaacagagatactacggtggtggctatggctctacccaggccaccttcatggtgttccaagccttggctcaataccaaaaggacgcccctgaccaccaggaactgaaccttgatgtgtccctccaactgcccagccgcagctccaagatcacccaccgtatccactgggaatctgccagcctcctgcgatcagaagagaccaaggaaaatgagggtttcacagtcacagctgaaggaaaaggccaaggcaccttgtcggtggtgacaatgtaccatgctaaggccaaagatcaactcacctgtaataaattcgacctcaaggtcaccataaaaccagcaccggaaacagaaaagaggcctcaggatgccaagaacactatgatccttgagatctgtaccaggtaccggggagaccaggatgccactatgtctatattggacatatccatgatgactggctttgctccagacacagatgacctgaagcagctggccaatggtgttgacagatacatctccaagtatgagctggacaaagccttctccgataggaacaccctcatcatctacctggacaaggtctcacactctgaggatgactgtctagctttcaaagttcaccaatactttaatgtagagcttatccagcctggagcagtcaaggtctacgcctattacaacctggaggaaagctgtacccggttctaccatccggaaaaggaggatggaaagctgaacaagctctgccgtgatgaactgtgccgctgtgctgaggagaattgcttcatacaaaagtcggatgacaaggtcaccctggaagaacggctggacaaggcctgtgagccaggagtggactatgtgtacaagacccgactggtcaaggttcagctgtccaatgactttgacgagtacatcatggccattgagcagaccatcaagtcaggctcggatgaggtgcaggttggacagcagcgcacgttcatcagccccatcaagtgcagagaagccctgaagctggaggagaagaaacactacctcatgtggggtctctcctccgatttctggggagagaagcccaacctcagctacatcatcgggaaggacacttgggtggagcactggcccgaggaggacgaatgccaagacgaagagaaccagaaacaatgccaggacctcggcgccttcaccgagagcatggttgtctttgggtgccccaactgaccacacccccattcccccactccagataaagcttcagttatatctca

SEQ ID NO: 7 - DNA, 5147 bp, Mus musculus
  source 1..5147: mol_type = genomic DNA
agagaggagagccatataaagagccagcggctacagccccagctcgcctctgcccacccctgccccttaccccttcattccttccacctttttccttcactatgggaccagcttcagggtcccagctactagtgctactgctgctgttggccagctccccattagctctggggatccccatgtattccatcattactcccaatgtcctacggctggagagcgaagagaccatcgtactggaggcccacgatgctcagggtgacatcccagtcacagtcactgtgcaagacttcctaaagaggcaagtgctgaccagtgagaagacagtgttgacaggagccagtggacatctgagaagcgtctccatcaagattccagccagtaaggaattcaactcagataaggaggggcacaagtacgtgacagtggtggcaaacttcggggaaacggtggtggagaaagcagtgatggtaagcttccagagtgggtacctcttcatccagacagacaagaccatctacacccctggctccactgtcttatatcggatcttcactgtggacaacaacctactgcccgtgggcaagacagtcgtcatcctcattgagacccccgatggcattcctgtcaagagagacattctgtcttccaacaaccaacacggcatcttgcctttgtcttggaacattcctgaactggtcaacatggggcagtggaagatccgagccttttacgaacatgcgccgaagcagatcttctccgcagagtttgaggtgaaggaatacgtgctgcccagttttgaggtccgggtggagcccacagagacattttattacatcgatgacccaaatggcctggaagtttccatcatagccaagttcctgtacgggaaaaacgtggacgggacagccttcgtgatttttggggtccaggatggcgataagaagatttctctggcccactccctcacgcgcgtagtgattgaggatggtgtgggggatgcagtgctgacccggaaggtgctgatggagggggtacggccttccaacgccgacgccctggtggggaagtccctgtatgtctccgtcactgtcatcctgcactcaggtagtgacatggtagaggcagagcgcagtgggatcccgattgtcacttccccgtaccagatccacttcaccaagacacccaaattcttcaagccagccatgccctttgacctcatggtgttcgtgaccaaccccgatggctctccggccagcaaagtgctggtggtcactcagggatctaatgcaaaggctctcacccaagatgatggcgtggccaagctaagcatcaacacacccaacagccgccaacccctgaccatcacagtccgcaccaagaaggacactctcccagaatcacggcaggccaccaagacaatggaggcccatccctacagcactatgcacaactccaacaactacctacacttgtcagtgtcacgaatggagctcaagccgggggacaacctcaatgtcaacttccacctgcgcacagacccaggccatgaggccaagatccgatactacacctacctggttatgaacaaggggaagctcctgaaggcaggccgccaggttcgggagcctggccaggacctggtggtcttgtccctgcccatcactccagagtttattccttcatttcgcctggtggcttactacaccctgattggagctagtggccagagggaggtggtggctgactctgtgtgggtggatgtgaaggattcctgtattggcacgctggtggtgaagggtgacccaagagataaccatctcgcacctgggcaacaaacgacactcaggattgaaggaaaccagggggcccgagtggggctagtggctgtggacaagggagtgtttgtgctgaacaagaagaacaaactcacacagagcaagatctgggatgtggtagagaaggcagacattggctgcaccccaggcagtgggaagaactatgctggtgtcttcatggatgcaggcctggccttcaagacaagccaaggactgcagactgaacagagagcagatcttgagtgcaccaagccagcagcccgccgccgtcgctcagtacagttgatggaaagaaggatggacaaagctggtcagtacactgacaagggtcttcggaagtgttgtgaggatggtatgcgggatatccctatgagatacagctgccagcgccgggcacgcctcatcacccagggcgagaactgcataaaggccttcatagactgctgcaaccacatcaccaagctgcgtgaacaacacagaagagaccacgtgctgggcctggccaggagtgaattggaggaagacataattccagaagaagatattatctctagaagccacttcccacagagctggttgtggaccatagaagagttgaaagaaccagagaaaaatggaatctctacgaaggtcatgaacatctttctcaaagattccatcaccacctgggagattctggcagtgagcttgtcagacaagaaagggatctgtgtggcagacccctatgagatcagagtgatgcaggacttcttcattgacctgcggctgccctactctgtagtgcgcaacgaacaggtggagatcagagctgtgctcttcaactaccgtgaacaggaggaacttaaggtgagggtggaactgttgcataatccagccttctgcagcatggccaccgccaagaatcgctacttccagaccatcaaaatccctcccaagtcctcggtggctgtaccgtatgtcattgtccccttgaagatcggccaacaagaggtggaggtcaaggctgctgtcttcaatcacttcatcagtgatggtgtcaagaagacactgaaggtcgtgccagaaggaatgagaatcaacaaaactgtggccatccatacactggacccagagaagctcggtcaagggggagtgcagaaggtggatgtgcctgccgcagaccttagcgaccaagtgccagacacagactctgagaccagaattatcctgcaagggagcccggtggttcagatggctgaagatgctgtggacggggagcggctgaaacacctgatcgtgacccccgcaggctgtggggaacagaacatgattggcatgacaccaacagtcattgcggtacactacctggaccagaccgaacagtgggagaagttcggcatagagaagaggcaagaggccctggagctcatcaagaaagggtacacccagcagctggccttcaaacagcccagctctgcctatgctgccttcaacaaccggccccccagcacctggctgacagcctacgtggtcaaggtcttctctctagctgccaacctcatcgccatcgactctcacgtcctgtgtggggctgttaaatggttgattctggagaaacagaagccggatggtgtctttcaggaggatgggcccgtgattcaccaagaaatgattggtggcttccggaacgccaaggaggcagatgtgtcactcacagccttcgtcctcatcgcactgcaggaagccagggacatctgtgaggggcaggtcaatagccttcctgggagcatcaacaaggcaggggagtatattgaagccagttacatgaacctgcagagaccatacacagtggccattgctgggtatgccctggccctgatgaacaaactggaggaaccttacctcggcaagtttctgaacacagccaaagatcggaaccgctgggaggagcctgaccagcagctctacaacgtagaggccacatcctacgccctcctggccctgctgctgctgaaagactttgactctgtgccccctgtagtgcgctggctcaatgagcaaagatactacggaggcggctatggctccacccaggctaccttcatggtattccaagccttggcccaatatcaaacagatgtccctgaccataaggacttgaacatggatgtgtccttccacctccccagccgtagctctgcaaccacgtttcgcctgctctgggaaaatggcaacctcctgcgatcggaagagaccaagcaaaatgaggccttctctctaacagccaaaggaaaaggccgaggcacattgtcggtggtggcagtgtatcatgccaaactcaaaagcaaagtcacctgcaagaagtttgacctcagggtcagcataagaccagcccctgagacagccaagaagcccgaggaagccaagaataccatgttccttgaaatctgcaccaagtacttgggagatgtggacgccactatgtccatcctggacatctccatgatgactggctttgctccagacacaaaggacctggaactgctggcctctggagtagatagatacatctccaagtacgagatgaacaaagccttctccaacaagaacaccctcatcatctacctagaaaagatttcacacaccgaagaagactgcctgaccttcaaagttcaccagtactttaatgtgggacttatccagcccgggtcggtcaaggtctactcctattacaacctcgaggaatcatgcacccggttctatcatccagagaaggacgatgggatgctcagcaagctgtgccacagtgaaatgtgccggtgtgctgaagagaactgcttcatgcaacagtcacaggagaagatcaacctgaatgtccggctagacaaggcttgtgagcccggagtcgactatgtgtacaagaccgagctaaccaacatagagctgttggatgattttgatgagtacaccatgaccatccagcaggtcatcaagtcaggctcagatgaggtgcaggcagggcagcaacgcaagttcatcagccacatcaagtgcagaaacgccctgaagctgcagaaagggaagaagtacctcatgtggggcctctcctctgacctctggggagaaaagcccaacaccagctacatcattgggaaggacacgtgggtggagcactggcctgaggcagaagaatgccaggatcagaagtaccagaaacagtgcgaagaacttggggcattcacagaatctatggtggtttatggttgtcccaactgactacagcccagccctctaataaagcttcagttgtatttcaaaaaaaaaaaaaaa

SEQ ID NO: 8 - DNA, 5091 bp, Rattus norvegicus
  source 1..5091: mol_type = genomic DNA
ctaccccttacccctcactccttccacctttgtcctttaccatgggacccacgtcagggtcccagctactagtgctactgctgctgttggccagctccctgctagctctggggagccccatgtactccatcattactcccaatgtcctgcggctggagagtgaagagactttcatactagaggcccatgatgctcagggtgatgtcccagtcactgtcactgtgcaagacttcctaaagaagcaagtgctgaccagtgagaagacagtgttgacaggagccactggacatctgaacagggtctccatcaagattccagccagtaaggaattcaatgcagataaggggcacaagtacgtgacagtggtggcaaacttcggggcaacagtggtggagaaagcggtgctagtaagctttcagagtggttacctcttcatccagacagacaagaccatctacaccccaggctccactgttttctatcggatcttcactgtggacaacaacctattgcctgtgggcaagacagtcgtcatcgtcattgagaccccggacggcgttcccatcaagagagacattctatcttcccacaaccaatatggcatcttgcctttgtcttggaacattccagaactggtcaacatggggcagtggaagatccgagccttctatgaacatgcaccaaagcagaccttctctgcagagtttgaggtgaaggaatacgtgctgcccagtttcgaagtcctggtggagcctacagagaaattttattacatcgatgacccaaagggcctggaagtttccatcacagccagattcctgtatgggaagaacgtggacgggacagctttcgtgatctttggggtccaggatgaggataagaagatttctctggcccagtccctcacccgcgtgctgatcgaggatggttcaggggaggcagtgctcagccgaaaagtgctgatggacggggtacggccctccagcccagaagccctagtggggaagtccctgtacgtctctgtcactgttatcctgcactcaggtagcgacatggtagaggcagagcgcagtgggatcccaattgtcacttccccgtaccagatccacttcaccaagacacccaaattcttcaagccagccatgcctttcgacctcatggtgtttgtgaccaaccctgatggctctccagcccgcagagtgccagtagtcactcagggatccgacgcgcaggctctcacccaggatgatggtgtggccaagctgagcgtcaacacacccaacaaccgccaacccctgactatcacggtccgcaccaagaaggagggtatcccggacgcgcggcaggccaccaggacgatgcaggcccagccctacagcactatgcacaattccaacaactacctgcacttgtcagtgtctcgggtggagctcaagcctggggacaacctcaatgtcaacttccacctgcgcacggacgctggccaagaggccaagatccgatactacacctatctggttatgaacaaggggaagttactgaaggcaggccgtcaggttcgggagcctggccaggacctggtggtcttgtcactgcccatcactccagaatttataccttccttccgcctggtggcttactacaccctgattggagctaatggccaaagggaggtggtggccgactcagtgtgggtggatgtgaaggactcctgtgtaggcacgctggtggtgaaaggtgacccaagagataaccgacagcccgcgcctgggcatcaaacgacactaaggatcgaggggaaccagggggcccgagtggggctagtggctgtggacaagggggtgtttgtgctgaacaagaagaacaaactcacacagagcaagatctgggatgtagtagagaaggcagacattggctgcaccccaggcagtgggaagaactatgcgggtgtcttcatggatgctggcctgaccttcaagacaaaccaaggcctgcagactgatcagagagaagatcctgagtgcgccaagccagctgcccgccgccgtcgctcagtgcagttgatggaaaggaggatggacaaagctggtcagtacaccgacaagggtctgcggaagtgttgtgaggatggcatgcgtgatatccctatgaagtacagctgccagcgccgggctcgcctcatcacccagggcgagagctgcctgaaggccttcatggactgctgcaactatatcaccaagcttcgtgagcagcacagaagagaccatgtgctgggcctggccaggagtgatgtggatgaagacataatcccagaagaagatattatctctagaagccacttcccagagagctggttgtggaccatagaagagttgaaagaaccagagaaaaatggaatctctacgaaggtcatgaacatctttctcaaagattccatcaccacctgggagattctggcagtgagcttgtccgacaagaaagggatctgtgtggcagacccctatgagatcacagtgatgcaggacttcttcattgacctgcgactgccctactctgtggtgcgcaatgaacaggtggagatcagagctgtgctcttcaattaccgtgaacaggagaaacttaaggtaagggtggaactgttgcataacccagccttctgcagcatggccactgccaagaagcggtactaccagaccatcgaaatccctcccaagtcctctgtggctgtgccttatgtcattgtccccttgaagatcggcctccaggaggtggaggtcaaggccgccgtcttcaaccacttcatcagtgatggtgtcaagaagatactgaaggtcgtgccagaaggaatgagagtcaacaaaactgtggctgtccgtacactggatccagaacacctcggtcaagggggagtgcagagggaggatgtacctgcagcagacctcagtgaccaagtgccagacacagattctgagaccagaattctcctgcaagggaccccggtggctcagatggccgaggacgctgtggacggggagcggctgaaacacctgatcgtgaccccctctggctgtggggagcagaacatgattggcatgacacccacggtcattgcagtacactatctggatcagaccgaacagtgggagaaattcggcctagagaagaggcaagaagctctggagctcatcaagaaagggtacacccagcagctggctttcaaacagcccagctctgcctatgctgccttcaacaaccggcctcccagcacctggctgacagcctatgtggtcaaggtcttctctctggctgccaacctcatcgccatcgactctcaggtcctgtgtggggctgtcaaatggctgattctggagaaacagaagccagatggtgtctttcaggaggacggaccagtgattcaccaagaaatgattggtggcttccggaacaccaaggaggcagatgtgtcgcttacagcctttgtcctcatcgcactgcaggaagccagagatatctgtgaggggcaggtcaacagccttcccgggagcatcaacaaggcaggggagtatcttgaagccagttacctgaacctgcagagaccatacacagtagccattgctgggtatgccctggccctgatgaacaaactggaggaaccttacctcaccaagtttctgaacacagccaaagatcggaaccgctgggaggagcctggccagcagctctacaatgtggaggccacctcctacgccctcctggccctgctgctgctgaaagactttgactctgtgcctcctgtggtgcgctggctcaacgagcaaagatactacggaggtggctatggctccacgcaggctaccttcatggtattccaagccttggctcaataccaaacagatgtccctgaccacaaggacttgaacatggatgtgtccctccacctccccagccgcagctccccaactgtgtttcgcctgctatgggaaagtggcagtctcctgagatcagaagagaccaagcagaatgagggcttttctctgacagccaaaggaaaaggccaaggcacactgtcggtggtgacagtgtatcacgccaaagtcaaaggcaaagccacctgcaagaagtttgacctcagggtcaccataaaaccagcccctgagacagccaagaagccccaggatgccaagagttctatgatccttgacatctgcaccaggtacttgggagacgtggatgctactatgtccatcctggacatctccatgatgactggctttattccagacacaaacgacctggaactgctgagctctggagtagacagatacatttccaagtatgagatggacaaagccttctccaacaagaacaccctcatcatctacctagaaaagatctcacactccgaagaagactgcctgtccttcaaagtccaccagttctttaacgtgggacttatccagccggggtcggtcaaggtctactcctactacaatctagaggagtcatgcacccggttctatcatccggagaaggacgatggaatgctgagcaagctgtgccacaatgaaatgtgccgctgtgcagaggagaactgcttcatgcatcagtcacaggatcaggtcagcctgaatgaacgactagacaaggcttgtgagcctggagtggactacgtgtacaagaccaagctaacgacgatagagctgtcggatgattttgatgagtacatcatgaccatcgagcaggtcatcaagtcaggctcagatgaggtgcaggcaggtcaggaacgaaggttcatcagccacgtcaagtgcagaaacgccctaaagctgcagaaagggaagcagtacctcatgtggggcctctcctccgacctctggggagaaaagcccaataccagctacatcattgggaaggacacgtgggtggagcactggcccgaggcagaggaatgtcaggatcagaagaaccagaaacagtgcgaagacctcggggcattcacagaaacaatggtggttttcggctgccccaactgaccacaacctccaataaagcttcagttgtattttacccatcaaaaaaaaaaaaaaaaaa

SEQ ID NO: 9 - DNA, 2693 bp, Homo sapiens
  source 1..2693: mol_type = genomic DNA
gcttgttccctgtcctctggccctttgcaaataaatgccttaccagacctgccctgccaccccactcgcagccacccagcaagagcagcatgtcagcctgccggagctttgcagttgcaatctgcattttagaaataagcatcctcacagcacagtacacgaccagttatgacccagagctaacagaaagcagtggctctgcatcacacatagactgcagaatgagcccctggagtgaatggtcacaatgcgatccttgtctcagacaaatgtttcgttcaagaagcattgaggtctttggacaatttaatgggaaaagatgcaccgacgctgtgggagacagacgacagtgtgtgcccacagagccctgtgaggatgctgaggatgactgcggaaatgactttcaatgcagtacaggcagatgcataaagatgcgacttcggtgtaatggtgacaatgactgcggagacttttcagatgaggatgattgtgaaagtgagccccgtcccccctgcagagacagagtggtagaagagtctgagctggcacgaacagcaggctatgggatcaacattttagggatggatcccctaagcacaccttttgacaatgagttctacaatggactctgtaaccgggatcgggatggaaacactctgacatactaccgaagaccttggaacgtggcttctttgatctatgaaaccaaaggcgagaaaaatttcagaaccgaacattacgaagaacaaattgaagcatttaaaagtatcatccaagagaagacatcaaattttaatgcagctatatctctaaaatttacacccactgaaacaaataaagctgaacaatgttgtgaggaaacagcctcctcaatttctttacatggcaagggtagttttcggttttcatattccaaaaatgaaacttaccaactatttttgtcatattcttcaaagaaggaaaaaatgtttctgcatgtgaaaggagaaattcatctgggaagatttgtaatgagaaatcgcgatgttgtgctcacaacaacttttgtggatgatataaaagctttgccaactacctatgaaaagggagaatattttgcctttttggaaacctatggaactcactacagtagctctgggtctctaggaggactctatgaactaatatatgttttggataaagcttccatgaagcggaaaggtgttgaactaaaagacataaagagatgccttgggtatcatctggatgtatctctggctttctctgaaatctctgttggagctgaatttaataaagatgattgtgtaaagaggggagagggtagagctgtaaacatcaccagtgaaaacctcatagatgatgttgtttcactcataagaggtggaaccagaaaatatgcatttgaactgaaagaaaagcttctccgaggaaccgtgattgatgtgactgactttgtcaactgggcctcttccataaatgatgctcctgttctcattagtcaaaaactgtctcctatatataatctggttccagtgaaaatgaaaaatgcacacctaaagaaacaaaacttggaaagagccattgaagactatatcaatgaatttagtgtaagaaaatgccacacatgccaaaatggaggtacagtgattctaatggatggaaagtgtttgtgtgcctgcccattcaaatttgagggaattgcctgtgaaatcagtaaacaaaaaatttctgaaggattgccagccctagagttccccaatgaaaaatagagctgttggcttctctgagctccagtggaagaagaaaacactagtaccttcagatcctacccctgaagataatcttagctgccaagtaaatagcaacatgcttcatgaaaatcctaccaacctctgaagtctcttctctcttaggtctataatttttttttaaatttttcttccttaaactcctgtgatgtttccattttttgttccctaatgagaagtcaacagtgaaatacgccagaactgctttatcccacggaaaatgccaatctcttctaaaaaaaaacaaaattaaattaaaaacagaatgttggtttaaaaaacttcaaagtaattttcaaacggctttgtatggttaacatattctgccaggtccatgaccacacgtctgtaccatgcaatttaactcttatttacattgttatgtttagtttggttatttgcttaggtgtgcatacattcattcagcaaatgctgagcaccagccacgtgcacagcagttgcttttactagtcttagctctacgatttaaatccatgtgtccaagggggaaaacatattatatttgtaaccaaaaactactagtttaccagaggactgaagggagataaagaggagttggttaatgggtacaaaaatccagttagatgaaaggaataatatagatagtgttcagtagcagaatagaatgaacataaactattagtttaaattatgtgaaattccttctatttgatcatattttacaagaaaaaacatcaattttatatagtccaacttaatacctagccttatgagttgtataaggtaaggttacctacctgagaagctgattaacattggttgtacaatcttattcattagagaacatggtgcttagggtctgagaccttttgaaaggtctgagaactctttaaaaaaaggaaa

SEQ ID NO: 10 - DNA, 1767 bp, Mus musculus
  source 1..1767: mol_type = genomic DNA
actgccccttgtcctccggctgcaaaggaatgctttgcaagcctccagggctccccaggaggagcagcatggcctcaggcatggccatcaccttagcccttgccatctttgccttgggtgtcaatgcacagatgccaatacccgtttccagagaagaacaagaacaacactatcccataccgatagactgcagaatgagcccatggagcaattggtcagagtgtgatccttgcctcaaacaaaggtttcgctcaagaagcattttagccttcggacagtttaatgggaaaagctgtgttgatgttttgggagacagacaaggctgtgaacccacccaggagtgtgaagagatacaggaaaactgtggaaatgactttcagtgtgagacaggcaggtgcataaagaggagacttctgtgtaatggtgacaacgactgtggagattattctgatgagaatgactgtgacgatgacccacgcaccccatgccgtgaccgagtagcggaagaatcagagctgggactaacagcaggctatgggatcaacatcttagggatggagcccctgagaacaccttttgacaatgagttctacaacggactctgtgaccgggtacgagacgaaaagacatactatcgcaaaccttggaatgtagtttctctgatctatgaaaccaaggctgataaaagtttcagaactgagaactatgacgaacacttggaagtattcaaagccatcaaccgagagaagacctcgaattttaatgcagattttgccctaaaattttcagccaccgaagtacctgaaaagggagctggggaagtctccccagcagaacactcttcaaaacctacaaacatttcagctaaatttaaattttcatatttcatgggaaaaaattttcgaagactatcatcttatttttcgcagtcgaaaaagatgtttgtgcacttgagaggagtggtccaactggggagatttgtaatgaggaatcgggatgttgtgctgaggtcaactttcctggatgatgtaaaagctctaccaacttcctatgaaaagggagaatattttggatttttggaaacctatgggactcactacagtacctctgggtccctgggaggacaatatgaaattgtctatgtcttggataaagcttccatgaaagagaaaggtgttgacctgaatgatgtaaaacattgtcttggatttaatatggatttacgtattcctctacaagacgacttaaaggatgcatcagtcacagcaagtgttaatgcggatggttgcataaagacagataatgggaaaactgtaaacatcacccgcgataacatcatagatgatgtcatttcattcataagaggagggactagggagcaagcaattctcctgaaagagaagattctcagaggagacaagacatttgataagactgacttcgccaactgggcctcgtccctggcaaacgctccagctctcatcagtcaaagaatgtcccctatatataatctcattcctttgaaaataaaagatgcatacataaagaagcaaaatttggaaaaggctgttgaagactatatagatgaattcagtactaaaaggtgctacccatgtctaaatggaggtactataattcttctggatgggcagtgcctgtgctcctgcccaatgatgtttaggggaatggcctgcgaaatccatcaaaaaatatagccttcaggaaacaaagcaaaccctggttcacatggaagggggaaaaaaaaag

SEQ ID NO: 11 - DNA, 2083 bp, Rattus norvegicus
  source 1..2083: mol_type = genomic DNA
ggttgcaaagaaatgcttctcaggactccagggctgcctaggaggagcggcatggcctcaggcgtgaccatcaccctagccattgcaatctttgccttggagatcaatgcacaggccccagagcccactccccgggaagagccatcagcagacgccctcctaccaatagactgcagaatgagcacatggagtcagtggtcacagtgtgatccttgcctcaaacaaaggtttcgctcaagaagcatggaagtctttggacagtttcagggaaaaagctgtgctgatgctttgggagacagacaacattgtgaacccactcaggagtgtgaagaggtacaggaaaactgtgggaatgactttcagtgtgaaacaggcaggtgcataaagaggaaacttctgtgtaatggtgacaacgactgtggagatttttctgatgagagtgactgtgaaagtgacccgcgcctcccgtgccgtgaccgggtggtagaagaatcggaactgggacgaacagcaggatatgggatcaacatcttagggatggatcccctgggcacgccttttgacaatgagttctacaatggactctgtgaccgggtacgggacggaaacactttgacatactatcgcaaaccttggaacgtagcatttctggcctatgaaaccaaggctgacaaaaatttcagaactgagaattatgaagaacagtttgaaatgttcaaaaccatcgtccgagacaggaccacgagttttaatgctaatttagctctaaaattcacaatcactgaagcacctataaaaaaagttggagttgatgaagtcagcccagaaaaaaactcttcaaagcctaaagactcttctgttgattttcaattttcatatttcaagaaagaaaattttcaacgattgtcatcctacttgtcacagacgaaaaagatgtttctgcacgtgagaggaatgattcaactggggagatttgtcatgaggaatcggggcgttatgctgacgacaactttcctggatgatgtaaaggctttaccagtttcctatgaaaagggcgaatattttgggtttttggagacttatgggactcactacagtagctctgggtccctgggagggctctacgaactgatctatgtcttggataaagcttccatgaaagagaaaggtgttgaactcagcgacgtaaagcggtgtcttgggtttaacctggatgtttctctatatacgcctctacaaactgccttagaaggaccatcattgacagccaatgttaatcacagtgattgcttaaagacaggggatggtaaagtagtaaacatcagccgcgatcacatcatagatgatgttatttcattcataagaggagggaccaggaagcaagcagttctcctgaaagagaagcttctcagaggagccaagacgattgatgtgaacgacttcatcaactgggcctcatccttggatgacgctccagctctcattagtcaaaaactgtcccctatctataatctcattcctttgacaatgaaagatgcatacgcaaagaaacagaatatggaaaaggctattgaagactatgttaatgaattcagtgctagaaagtgctacccatgtcaaaacggaggcacagcaattcttctggatggacagtgcatgtgctcctgcacaatcaagtttaaggggattgcctgcgaaatcagtaaacaaagatagccttcaggaaacaaagcaaaacctggttcacatggaaggtggaaaaaaggacaaaaaaagaagaagagagaggagagagaagagagagagaaaagaaaaaaccccaggactttccaacttagcatcctaccctagagcgaatcctcactgccaagtagaaagcagcttgcttcatggaaatcctaccaacctctgatgtcgtctctgtttcaggtctacagtgcctttctcccctctttaatgcctataatgcttccatttttttttttatccctaatgaagaatcggcagtgagatatgccaggactgccttttcccacaggcaatgccaatctctcgctaataaaacagagttaaattaaaaaca

SEQ ID NO: 12 - DNA, 2646 bp, Homo sapiens
  source 1..2646: mol_type = genomic DNA
ttttttttttttttttttttgttgtcgcagctgttttaattcaatcccacgcccctgtccagcaggaaaccccttatagaaaacccaaatcctcatcttggagtttctccttcagccagggcagcacttgaaagaggttgatgtgaaagtctcgggcgtgagcaggtacctgcttttgccgcttctggtttttgcagacatccactactccccagctgattacaccaacttgaatgaaacgacttctcttgtgaactatcaaggggccgccagaatcacctctgcaagtattggggtcagcatagggactcactcctccagtacaaaggaaccgaggggtgaccacctctgagatgtccttgactttgtcatagcctggggcatattgagcatctctctcacagctgcctttcttatccccattcttgatgtagacctccttccgagtcagctttttctcctcctcagacacaaacagagctttgatatcctgtgcagggagcagctcttccttttgttgctggcaagtggtagttggaggaagcctcaaagctcgagttgttccctcggtgcaggggagacaaatgggcctgatagtctggccatatttcagcttattcttgagcttgatcagggcaacgtcatagtcataaaattcaggaattcctgcttcttttttcccattaatgttgtagttggggtgaaataggactacttctatctccaggtcccgcttctcccctcctacgctgaccttgattgagtgttccttgtcatccacagtgaaacaatgtgctgctgtcagcacaaagtactcagacaccacagcccccatacagctctcgtgtccctttgaagggcgaatgactgagatcttggcctgccatggttgcttgtggtaatcggtacccttcctgtgttcccaaaccatgccacagagactcagagactggctttcatcgatcatttggtagaaaacatcttccaggttttccatatccttgactttgaacacatgttgctcattgtctttcttggaagccaaagcattgatgttcacttggttcaccaaaggcccgaccccaaacacatagacatccagataatcctcccttgggtttttgcgatccttgccaatgtatagcaagtcccggatctcatcaatgacagtaattgggtccccgcccatgttgtgcaatccatcagtcatgaggatgatgacatggcgggtgcggttccagccttcaggagggacgtcatctggccagctcatcatgctgtacactgcctggagggccttcttggtgttagtccctgacttcaacttgtggtcttcataattgatttcattgagctgcttcgtgacccagtctgcattactgctgtctgcttcagacactttgacccaaattttggggtatgtggcatatgtcactagaccatatcttggcttcacaccataacttgccaccttctcaattaagttgactagacactttttggctcctgtgaagttgctggccccaatgctgtctgatccatctagcaccaggtagatgttcatggagcctgaagggtccaggacgatcttccgcttctgttgttcccctgggccgtgcccatcctcagcatcgactccttctatggtctctgtcagggaagacaggaaagcttcggccacctcttgaggggtgtcgtacatgaaggagtcttggcaggaaggctccgtcccgctccaagagccaccttcctgacacgttcgccgctgggagccacgcagggtaagcccccggctgcagtggtaggtgacgctgtcttcaaggcggtactggctgcccaccttccttgtgccaatggggatgcccgggttggagcagtaccccgctccgttgtcacagatcgctgtctgcccactccatcggccattcacttggcaggtgcgattggcagagccccggagagtgtaaccgtcatagcagtggaaagagatctcatcactcacattgtagtagggagaccggggccagtattccccgttctcgaagtcgtgtggtcttggacagtggattgctctgcactctgccttcctgacagtcttttggtcttgagtcttcagggtgctccaggaccccgtagatctgcaggtacgtgtctgcacagggtacgggtagaagccagaaggacacacgtactccagtgcctggccctcttggagaagtcggaaggagccgcctttgatctctaccccctccagagagcaggatccctggggccgggccaaagaccatggagtggtggtcacacctccagacaagaggcccaagataaagggcatcaggcagagttgggggctgagattgctccccatggcgttggaaggcaggagagaagctgggcctggggcaggatggtgtgtcctggcttgctttgcttgtctgcttggctcagtgtccaagctgaaactccagacctagacctggtcacattcccttcccctgctccccaccagcccccagccttttatacaatctgtgttctggcacctgcggctcgccccgcctgtcctacccacatcactttcccggaacatccaagcgggagggccccgctgagctgccagtcaaggaaacagaaactgcagaagtc

SEQ ID NO: 13 - DNA, 2767 bp, Mus musculus
  source 1..2767: mol_type = genomic DNA
ttttttttttttttttttttttgttattgtaactgctttaatctgtcctcacactctccctgcaggaagctctttatagaaaacccaaatcctcatctttgagcttgtcctttagccagggcagcacctggaagaggttgatgtggaagtcccgggcataagagggtaccagctgttgccgcctctggtctctgcagacatctactactccccagctaatcacaccaacttgaatgaagcggcttctcttgtgaacaatgagagggcccccggaatctcctttgcatgtgttggggtcagcatagggatccacccctcctgtgcagaggaaccgtggagtgaccacctcagaggcatctttgaccttctcatagccttgggcctttgtagcatctctctcacaactggctttcttgtccccattcttgatgtacacctccttccgagtcaggctcttcccttgctcagatacaaacagagctttgacatccttcacagggagcaactgttccttgtgctgcttgcaggtggctgtctgaggaagcctcaaggctcgtgtggttccctccgtgcaggggagacagatgggcctgagagtctggccatacttgagcttgttcttgagcttgactagggccacatcataatcatagaactcagggatcccttctgcctttttcccattaatattgtatttggggtggaacaggacctcttcaatctccaggtcccgcctctgaccccccacgctgaccttgatggaatgtttctgatcatccaccatgaagcagtgcgctgctgtcagcacgaagtactcagacaccacggcccccatacaggtctcatgtcctttcagagggcgagtgactgagatcttggcttgccatggttgcttatgataatcgttgccttttttatgctcccacaccatgccacagagactcagagatttggtttcatcaatcatttggtagaaaacattctccaggtcttccatatccttgactttaaacacatgatgctcattgtcctttttggaagctaaggcattgatgttcacggagtccaccagaggcccgaccccaaacacatacacatccaggtaatcctccctgggatttttgggatccctgccgatgtccagcaaggctcggatgtcctgaatgacagtgacagggtttccacccatgttgtgcaagccatcagtcataatgatgatgacatggcgggttctattccagccttcaggcggggcatcccctgcccagctcatcatgctatacacagcctggagagccctcttggtgttggtccctgacttcagcttgtggtcttcataactgatttggttgagcttctctgtgacccagtcggcatcgctactcctctcatcagacactctgaccaacactttggggactgtagcatatgtcaggagaccatatcgtggcctcaccccgtaactcgccaccttctcaatcaagttggtgaggcaccgcttagcccctgtgaagttgctgcttccgatgctgtctgatccatctagcaccaggtagatattcatggagcccgaggggtctaggacaatcttcctcttctgctgttctcctgggctgtgcccatcctcagcatcggctccttcgatggtctctgtcagggaggataggaatgcttcggccacttcttgagggctgtcatacatgaaggaatcttggcaggaaggctctgtcccactccatgagccaccttcttgacactttcgcttctgggagccacgcaggacaagtccccggctgcagtggtaagtaacaatgtcttcaaggcggtattggctacccaccttccttgtcccaataggaataccgggattgggacagtatccagctccatcatcacaaattgctgtttgcccatcccaccggccattctcttggcaggtgcgattagcagagccccggagaacgtaaccatcatagcattgaaaagaaatctggtcactcaggttgtagaagggggaccggggccagaattccccattttcaaagtcctgcggtcgtgggcagcgtattgctctgcattccgccttctggacaatcttttggtctcgggtctgcaggtcgctccaggagcctgtggatctgcaggttcgagtctgcacggggtatgggtagaagccagagggacataggtactccagggcctgaccgccttggagaagttgaaaggagccgcctttgatctctactccctccagagagcaggagacttggggccgggcctcaagcactggagttgcgctcacacctccagaggagaagcctaagaccaagaggacgaggcagagctgggggctctccattgtcatggaaagcaccagagagtccagtggcccaaagccctctccaggtcactctgggtgcctatttgacctcctgtccaaactgaaacccaaatgctggatctggctacacccctttcccactgtcccctaaccttttatgcaatctgctctggcatctgcagcctggccagcctaccctgcgcacgcagccactgcttcccggaacattcatgaaggagggccccagctgaactgccaactgaggaaacagaaactatgtgagccccacccttgactgaccaagggccagaacttccctttcaaagctccctcttagcccccagacccctcctaacaagcacagaccaccacctccactacccccaatttaaaagatcagtctttccatggactgtgtgatggagc

SEQ ID NO: 14 - DNA, 2763 bp, Mus musculus
  source 1..2763: mol_type = genomic DNA
ttttttttttttttttttttttgttattgtaactgctttaatctgtcctcacactctccctgcaggaagctctttatagaaaacccaaatcctcatctttgagcttgtcctttagccagggcagcacctggaagaggttgatgtggaagtcccgggcataagagggtaccagctgttgccgcctctggtctctgcagacatctactactccccagctaatcacaccaacttgaatgaagcggcttctcttgtgaacaatgagagggcccccggaatctcctttgcatgtgttggggtcagcatagggatccacccctcctgtgcagaggaaccgtggagtgaccacctcagaggcatctttgaccttctcatagccttgggcctttgtagcatctctctcacaactggcttgtccccattcttgatgtacacctccttccgagtcaggctcttcccttgctcagatacaaacagagctttgacatccttcacagggagcaactgttccttgtgctgcttgcaggtggctgtctgaggaagcctcaaggctcgtgtggttccctccgtgcaggggagacagatgggcctgagagtctggccatacttgagcttgttcttgagcttgactagggccacatcataatcatagaactcagggatcccttctgcctttttcccattaatattgtatttggggtggaacaggacctcttcaatctccaggtcccgcctctgaccccccacgctgaccttgatggaatgtttctgatcatccaccatgaagcagtgcgctgctgtcagcacgaagtactcagacaccacggcccccatacaggtctcatgtcctttcagagggcgagtgactgagatcttggcttgccatggttgcttatgataatcgttgccttttttatgctcccacaccatgccacagagactcagagatttggtttcatcaatcatttggtagaaaacattctccaggtcttccatatccttgactttaaacacatgatgctcattgtcctttttggaagctaaggcattgatgttcacggagtccaccagaggcccgaccccaaacacatacacatccaggtaatcctccctgggatttttgggatccctgccgatgtccagcaaggctcggatgtcctgaatgacagtgacagggtttccacccatgttgtgcaagccatcagtcataatgatgatgacatggcgggttctattccagccttcaggcggggcatcccctgcccagctcatcatgctatacacagcctggagagccctcttggtgttggtccctgacttcagcttgtggtcttcataactgatttggttgagcttctctgtgacccagtcggcatcgctactcctctcatcagacactctgaccaacactttggggactgtagcatatgtcaggagaccatatcgtggcctcaccccgtaactcgccaccttctcaatcaagttggtgaggcaccgcttagcccctgtgaagttgctgcttccgatgctgtctgatccatctagcaccaggtagatattcatggagcccgaggggtctaggacaatcttcctcttctgctgttctcctgggctgtgcccatcctcagcatcggctccttcgatggtctctgtcagggaggataggaatgcttcggccacttcttgagggctgtcatacatgaaggaatcttggcaggaaggctctgtcccactccatgagccaccttcttgacactttcgcttctgggagccacgcaggacaagtccccggctgcagtggtaagtaacaatgtcttcaaggcggtattggctacccaccttccttgtcccaataggaataccgggattgggacagtatccagctccatcatcacaaattgctgtttgcccatcccaccggccattctcttggcaggtgcgattagcagagccccggagaacgtaaccatcatagcattgaaaagaaatctggtcactcaggttgtagaagggggaccggggccagaattccccattttcaaagtcctgcggtcgtgggcagcgtattgctctgcattccgccttctggacaatcttttggtctcgggtctgcaggtcgctccaggagcctgtggatctgcaggttcgagtctgcacggggtatgggtagaagccagagggacataggtactccagggcctgaccgccttggagaagttgaaaggagccgcctttgatctctactccctccagagagcaggagacttggggccgggcctcaagcactggagttgcgctcacacctccagaggagaagcctaagaccaagaggacgaggcagagctgggggctctccattgtcatggaaagcaccagagagtccagtggcccaaagccctctccaggtcactctgggtgcctatttgacctcctgtccaaactgaaacccaaatgctggatctggctacacccctttcccactgtcccctaaccttttatgcaatctgctctggcatctgcagcctggccagcctaccctgcgcacgcagccactgcttcccggaacattcatgaaggagggccccagctgaactgccaactgaggaaacagaaactatgtgagccccacccttgactgaccaagggccagaacttccctttcaaagctccctcttagcccccagacccctcctaacaagcacagaccaccacctccactacccccaatttaaaagatcagtctttccatggactgtgtgatggagc

SEQ ID NO: 15 - DNA, 2573 bp, Rattus norvegicus
  source 1..2573: mol_type = genomic DNA
ttttttttttttttttgtatttgtattgtagctgctttaatctgccctcaccctcccagcaggaagctccttataagaaacccaagtcctcgtctttgagcttctcctttagccagggcagcacctggaagagattgatgtggaagtcccgggcataggagggcaccaactgttgccgcctcgggtctttgcagacatccactactccccagctgatcacaccaacttgaatgaagcggcttctcttgtgaacaatgagagggcccccggagtctcctttgcatgtgttggggtcagcatagggatctacccctccggtgcacaggaacctgggggtgaccacctcagaggcaactttgaccttctcatagccttgggcctttgtagcatctctctcacaactggctttcttttccccattcttgatgtacacctccttccgggtcagcttcttcccttcctcggatacaaacagagctttgacgtccttcatagggagcaactcttccttgtgctgtttgcaggtggctgtctgaggaagccgcaaggctcgggtggttccctctgtgcaggggagacagatgggcctgagagtctggctgtacttcagcttggtcttgagcttgatgagggcaacatcatagtcatagaactcagagattccttctgcctttttcccattgatgtcgtaattagggtggaacaggacctcttcaatctccaggtcccgccttttcccctccacgttgaccttgatggagtgtttctgatcttccactgtgaagcaatgcgctgctgtcagcacgaagtactcggacaccacggcccccatacagttctcatgtcctttcagaggacgagtgactgagatcttggcttgccatggttgcttgtaataatcaccgcctttctgatgctcccacaccatgccacagagacccagagatttggtttcatcgatcattttgtagaagacgttctccagatcctccatgtccttgaccttgaacacatgctgctcattgttctttttggaagccaaggcattgatgttcacagggtccaccagaggcccgaccccaaacacatacacatccaaataatcctcccggggatttttgcgatccctgccaatatccagcaagtctcggatgtcctcaatgacagtgacagggtctccacccatgttgtgcaagccatcagtcatgatgatgatgacgtggcgggttcgattccagccttcaggcggagcatcccctggccagctcatcatgctgtatacagcctggagagccttcttggtgttggtccctgacttcagcttgtggtcttcataactgatttggttgagcttctctgtgacccagtcggcatcactactcctctcctcagacactctgaccaagactttggggactgtggcatatgtcactagaccgtatcttggcttcaccccataactcgccaccttctcaatcaagttggcgagacaccgcttggcccctgtgaagttgctggccccgatgctgtcggatccatccagcaccatgtagatattcatggagcccgaggggtccaggataatcttcctcttctgctgttcccctgggctgtgcccatcctccgcatctgctccttcgatggtctctgtcagggaggatagaaatgcttcggccacctcttgagggctgtcgtacatgaaggaatcttggcaggaaggctctgtcccactccacgagccaccttcctggcaccttcgctgctgggagccacgtaggacaagtccccgactacagtggtaagtgacagtgtcttcaagacggtactggcttcccaccttccttgtcccaataggaatacccgggttgggacagtatcccgctccatcatcacagattgctgtttgcccatcccaccggccattctcttggcaggtgcgattagcagagccccggagagtgtagccatcatagcattgaaaagaaatctgatcactcaggttgtagtagggggaccggggccagaactccccattttcaaagtcctgtggtcgtgggcagcgtattgctctgcattctgccttcttgacaatcttttggtcccgggtctggaggacactccaggagcctgtggatttgcaggttcgagtctgcacagggtatgggtagaagccagagggacacaggtactccagggcctgaccgtcttggagaagttggaaggagccgcctttgatctctactccctccagagagcaagagacctggggccgggcctcaagcactggagttgcgctcacacctccggaggagaggcctaagaccaagaggactaagcagagctggggaccctccattgtcatggaaagcccgtggccaaaagccctttccagttcactctgggtggctacttgacttgctgtccagactgaaactccagtgctggatctggctacacccctttcccaccggcccctaaccttttatgcaatctgctctggcacctgcagcctggccaacctaccctgcacagacgctgcttcccggaacattcatgaaggagggcccctgctg

SEQ ID NO: 16 - DNA, 2334 bp, Pan troglodytes
  source 1..2334: mol_type = genomic DNA
accccttatagaaaacccaaatcctcatcttggagtttctccttcagccagggcagcacttgaaagaggttgatgtgaaagtctcgggcgtgagcaggtacctgcttttgccgcttctggtttttgcagacatccactactccccagctgattacaccaacttgaatgaaacgacttcttttgtgaactatcaaggggccgccagaatcacctctgcaagtattggggtcagcatagggactcactcctccagtacaaaggaaccgaggggtgaccacctctgagatgtccttgactttgtcatagcctggggcatattgagcatctctctcacagctgcctttcttatccccattcttgatgtagacctccttccgagtcagctttttctcctcctcagacacaaacagagctttgatatcctgtgcagggagcagctcttccttttgttgctggcaagtggtagttggaggaagcctcaaagctcgagttgttccctcggtgcaggggagacaaatgggcctgatagtctggccatatttcagcttattcttgagcttgatcagggcaacgtcatagtcataaaattcaggaattcctgctgcttttttcccattaatgttgtagttggggtgaaataggactacttctatctccaggtcccgcttctcccctcctacgctgaccttgattgagtgttccttgtcatccacagtgaaacagtgtgctgctgtcagcacaaagtactcagacaccacagcccccatacagctctcgtgtccctttgaagggcgaatgactgagatcttggcttgccatggttgcttgtggtaatcggtacccttcctgtgttcccaaaccatgccacagagactcagagactggctttcatcaatcatttggtagaaaacatcttccaggttttccatatccttgactttgaacacatgttgctcattgtctttcttggaagccaaagcattgatgttcacttggttcaccaaaggcccgaccccaaacacatagacatccagataatcctcccttgggtttttgcgatccttgccaatgtatagcaagtcccggatctcatcaatgacagtaattgggtccccgcccatgttgtgcaatccatcagtcatgaggatgatgacatggcgggtgcggttccagccttcaggagggatgtcatctggccagctcatcatgctgtacactgcctggagggccttcttggtgttagtccctgacttcaacttgtggtcttcataattgatttcattgagctgcttcgtgacccagtctgcattactgctgtctggatcagacactttgacccaaattttggggtgtgtggcatatgtcactagaccatatcttggcttcacaccataacttgccaccttctcaattaagttgactagacactttttggctcctgtgaagttgctggccccaatgctgtctgatccatctagcaccaggtagatgttcatggagcctgaagggtccaggacgatcttccgcttctgttgttcccctgggccgtgcccatcctcagcatcgactccttctatggtctctgtcagggaagacaggaaagcttcggccacctcttgaggggtgtcgtacatgaaggagtcttggcaagaaggctccgtcccgctccaagagccaccttcctgacacgttcgccgctgggagccacgcagggtaagcccccggctgcagtggtaggtgacgctgtcttcaaggcggtactggctgcccaccttccttgtgccaatggggatgcccgggttggagcagtaccccgctccgttgtcacagatcgctgtctgcccactccaccggccattcacttggcaggtgcgattggcagagccccggagagtgtaaccgtcatagcagtggaaagagatctcatcactcacattgtagtagggagaccggggccagtattccccgttctcgaagtcgtgtggtcttggacagtggattgctctgcactctgccttcctgacagtcttttggacttgagtcttcagggtgctccaggaccccgtagatctgcaggtacgtgtctgcacagggtacgggtagaagccagaaggacacacgtactccagtgcctggccctcttggagaagtcggaaggagccgcctttgatctctaccccctccagagagcaggattcctggggctgggccaaaggccatggagtggtggtcacacctccagacaagaggcccaagatgaagggcatcaggcagagttgggggctgagattgctccccatggcgttggaaggcaggagagaagctgggcctggg

SEQ ID NO: 17 - DNA, 5101 bp, Homo sapiens
  source 1..5101: mol_type = genomic DNA
tgagatataactgaagctttatctggagtgggggaatgggggtgtggtcagttggggcacccaaagacaaccatgctctcggtgaaggcgccgaggtcctggcattgtttctggttctcttcgtcttggcattcgtcctcctcgggccagtgctccacccaagtgtccttcccgatgatgtagctgaggttgggcttctctccccagaaatcggaggagagaccccacatgaggtagtgtttcttctcctccagcttcagggcttctctgcacttgatggggctgatgaacgtgcgctgctgtccaacctgcacctcatccgagcctgacttgatggtctgctcaatggccatgatgtactcgtcaaagtcattggacagctgaaccttgaccagtcgggtcttgtacacatagtccactcctggctcacaggccttgtccagccgttcttccagggtgaccttgtcatccgacttttgtatgaagcaattctcctcagcacagcggcacagttcatcacggcagagcttgttcagctttccatcctccttttccggatggtagaaccgggtacagctttcctccaggttgtaataggcgtagaccttgactgctccaggctggataagctctacattaaagtattggtgaactttgaaagctagacagtcatcctcagagtgtgagaccttgtccaggtagatgatgagggtgttcctatcggagaaggctttgtccagctcatacttggagatgtatctgtcaacaccattggccagctgcttcaggtcatctgtgtctggagcaaagccagtcatcatggatatgtccaatatagacatagtggcatcctggtctccccggtacctggtacagatctcaaggatcatagtgttcttggcatcctgaggcctcttttctgtttccggtgctggttttatggtgaccttgaggtcgaatttattacaggtgagttgatctttggccttagcatggtacattgtcaccaccgacaaggtgccttggccttttccttcagctgtgactgtgaaaccctcattttccttggtctcttctgatcgcaggaggctggcagattcccagtggatacggtgggtgatcttggagctgcggctgggcagttggagggacacatcaaggttcagttcctggtggtcaggggcgtccttttggtattgagccaaggcttggaacaccatgaaggtggcctgggtagagccatagccaccaccgtagtatctctgttcattgagccaacgcacgacgggaggcacaaagtcaaagtcttttagctgcagtagggccaagagggcataggatgtggcctccacgttgtagagctgcttaccagggtcctcccagcggttcttatctttggctgtggtcagaaatttgttaagaagaggccccttcagcctgcccatctgggccagagcatagccagcaatggccacagtgtaggatctctgtaggttcatgtagttggcttcaaggaagtctcctgctttagtgatgctgcctggcaggctgttgacctgctcctcgcaaatatctttagcctcctgcagcgagatgagaacaaaggccgtgagggccatgtctttctcgttgttgttccgtaatccaccaatcatttcttggtgtatcacgggcgcatcctcctggaagaccccgtcgggcttctgcttctccaggatcagccatttaacagccccgcagaggacttgggagtcgatggcgatgaggttgacagccagagagaagaccttgaccacgtaggcggtcagccaggtgctgggtgcccgtttcacgaaggccgcaaaggcagagctgggttgtctgaaggccagctgctgggtgtaccccttcttgatgagctccaaggccccctgccgcttctctaggccgaacttctcccactgctccgtttcatccaggtaatgcacagcgatgaccgtgggcgtcatgccgatcatgttctgttccccgcagcccgagggggtcacaatgaggtgcttcagccgttccgcgtcgacggcatcctctgtcatctgggccactggggtcccttgcaggagaattctggtctcagactcggtgtccgggacttggtcactgaggtctgcaggtgggatgtcctctttctgcactccttcacggcccaggcgttctggatccagggtgcgaacagccacagttttgttcattctgattccttccggcacgaccttcagggacttcctgacaccgtcactgatgaaatgatggtagacagcagccttgacttccacttcctgcaggccggtctttagcggcacgatgacatatggaacggacaacgaggacttgggggggatggttacggtctgctggtgacgcctcttggtggtggccaggctgcagaaggctggattgtggagtagttccaccctcaccttgagctcttggttctgccggtaattgtagagaacggctcggatttccacctgctcgtttcgaacaacagagtagggtagccgcaggtcgatgaagaagtcctgcattactgtgacctcgaaggggtctgccacacagatccctttcttgtccgacatgctcacagccagaatctcccacgtggtgatggagtctttcaaaaatatattcatgagcttcgtagagattccatttttcggtggctctttcaagtcctcaacgttccacagccagctctctgggaactcacttcgggaaacgatgttctcttctgcaatgatgtcctcatccaggttactcctggccaggcccaggtggctggcccgcgcgtgctgccgccgcagctctgtgatgtagttgcagcagtccaggaagaccttcttgcacgcctcgcccagggagatgaaacgggtccggcgctggcacgagaacctcatggggttctcccgcatgccgtcctcgcagcacttgcgcagctccttggggtacttgccgactttgtccattcgcttctccgtgagctgcacggaacggcgtcggcgggcggctggctgcgggcactgaagttctgccctctgggcggtctgctggccactgctgctcgtgaaggtcagccctgcgtcggagaagacaccggcgtaatccttcccactgcccggggtgcagccgatgtctgccttctccaccacgtcccagatcttactctgcgtcagtttgttcttcttattcagcacgaacacgcccttgtccacggccaccagtaccacccgggccccgtggtcaccctctatcttcagggtcatctgctgcccaggtacaggctgccggtcttctgactggccgctttttaccaccagcgagcccacgcaggagtccttgacgtccacccacacggagtcggccaccacctccctctggccgctggcaccgatcagcgtgtagtacgccaccaggcggaaggaagggatgaagtcggtggtgatggacaggggcagcaccaccaggtcctggccgggctctcgcacctggcgtcccgccttcaacagcctgcccttgttcatgatcaggtaggtgtagtagcggatcttggcctcgtgggcgcggtccattcgcaggaggaagttgacgttgagggtctccccgggtctgagctctgtacgtagcactgagagatgcaggtaattgttggagttgcccacggtgctgtagggcagagcctgcatggtcctggtagcctgctctgcctccgagagctcctgcttcttcgtgcgcaccgtgatgctcaagggcttctggctggggtgtgtgttgatgctgagtttggccacgccatctccctgggttagagactgcacagtgtcctcgccctggactgccacggggactcggtaggctggagagccatcagggttcgtcacgaacaccatgaggtcaaagggcattcctggtttgaagtacttgggtgtcttggtgaagtggatctggtagggagaggtcacgatggggatcccgctgcgctctgcctgcaccatgtcactgcctgagtgcaagatgacggtggcagacacgtacaaagacttccccaccaggtcttctgctcgggggttctgcaccccgtccagcagtaccttccggctcagcacaacctcccccgagccatcctcaatcggaatgcgcttgagggattcaggcagggaaatcctctgttcgccatcctggatcccgaagatgacaaaggcagttccctccactttcttcccgtagaggaacctggcggtgatggtgacctccaggcccttctcgttatagatgtagtagaatttctctgtaggctccactatgacctcgaaactgggcagcacgtactccttcacctcaaactcagtggagaagacctgctgtggtgagttttcatagtaggctcggatcttccactggcccatgttgacgagttccggaatgtcccaagacaagggcaagacgccaagctggttctgagaagacaaggagtcctgcttgaccgggatgccttccgggttctcaatgttgaccatgaccgtccggcccacgggtagcagcttgtggttgacggtgaagatccgatagagaactgtggagccaggggtgtagatggtcttgtctgtctggatgaagaggtacccgctctgcaggctgaccagcaccaccttctccaccacttgggtcccgaaggtggcctgcacggtcacgaacttgttgcgccccttttctgacttgaactccctgttggctgggatcgtgaaggtgacgttgcccatgtggttggtggcaggggtcagcacagtcttctcactggacagcactagttttttgcctgggaagtcgtggacagtaacagtgactggaacatccccttgcgcgtcgtgggcctccagcaccatggtctcctcgctctccagccgcaagatgttgggggtgatgatagagtacatgggactccccagagccagggggaggtgggttagtagcaggagcagcaggctgggacctgaggtgggtcccatggtgctgggacagtgcagggtcagagggacagagggacagagggagaggatggggaggagtg

SEQ ID NO: 18 - DNA, 5147 bp, Mus musculus
  source 1..5147: mol_type = genomic DNA
tttttttttttttttgaaatacaactgaagctttattagagggctgggctgtagtcagttgggacaaccataaaccaccatagattctgtgaatgccccaagttcttcgcactgtttctggtacttctgatcctggcattcttctgcctcaggccagtgctccacccacgtgtccttcccaatgatgtagctggtgttgggcttttctccccagaggtcagaggagaggccccacatgaggtacttcttccctttctgcagcttcagggcgtttctgcacttgatgtggctgatgaacttgcgttgctgccctgcctgcacctcatctgagcctgacttgatgacctgctggatggtcatggtgtactcatcaaaatcatccaacagctctatgttggttagctcggtcttgtacacatagtcgactccgggctcacaagccttgtctagccggacattcaggttgatcttctcctgtgactgttgcatgaagcagttctcttcagcacaccggcacatttcactgtggcacagcttgctgagcatcccatcgtccttctctggatgatagaaccgggtgcatgattcctcgaggttgtaataggagtagaccttgaccgacccgggctggataagtcccacattaaagtactggtgaactttgaaggtcaggcagtcttcttcggtgtgtgaaatcttttctaggtagatgatgagggtgttcttgttggagaaggctttgttcatctcgtacttggagatgtatctatctactccagaggccagcagttccaggtcctttgtgtctggagcaaagccagtcatcatggagatgtccaggatggacatagtggcgtccacatctcccaagtacttggtgcagatttcaaggaacatggtattcttggcttcctcgggcttcttggctgtctcaggggctggtcttatgctgaccctgaggtcaaacttcttgcaggtgactttgcttttgagtttggcatgatacactgccaccaccgacaatgtgcctcggccttttcctttggctgttagagagaaggcctcattttgcttggtctcttccgatcgcaggaggttgccattttcccagagcaggcgaaacgtggttgcagagctacggctggggaggtggaaggacacatccatgttcaagtccttatggtcagggacatctgtttgatattgggccaaggcttggaataccatgaaggtagcctgggtggagccatagccgcctccgtagtatctttgctcattgagccagcgcactacagggggcacagagtcaaagtctttcagcagcagcagggccaggagggcgtaggatgtggcctctacgttgtagagctgctggtcaggctcctcccagcggttccgatctttggctgtgttcagaaacttgccgaggtaaggttcctccagtttgttcatcagggccagggcatacccagcaatggccactgtgtatggtctctgcaggttcatgtaactggcttcaatatactcccctgccttgttgatgctcccaggaaggctattgacctgcccctcacagatgtccctggcttcctgcagtgcgatgaggacgaaggctgtgagtgacacatctgcctccttggcgttccggaagccaccaatcatttcttggtgaatcacgggcccatcctcctgaaagacaccatccggcttctgtttctccagaatcaaccatttaacagccccacacaggacgtgagagtcgatggcgatgaggttggcagctagagagaagaccttgaccacgtaggctgtcagccaggtgctggggggccggttgttgaaggcagcataggcagagctgggctgtttgaaggccagctgctgggtgtaccctttcttgatgagctccagggcctcttgcctcttctctatgccgaacttctcccactgttcggtctggtccaggtagtgtaccgcaatgactgttggtgtcatgccaatcatgttctgttccccacagcctgcgggggtcacgatcaggtgtttcagccgctccccgtccacagcatcttcagccatctgaaccaccgggctcccttgcaggataattctggtctcagagtctgtgtctggcacttggtcgctaaggtctgcggcaggcacatccaccttctgcactcccccttgaccgagcttctctgggtccagtgtatggatggccacagttttgttgattctcattccttctggcacgaccttcagtgtcttcttgacaccatcactgatgaagtgattgaagacagcagccttgacctccacctcttgttggccgatcttcaaggggacaatgacatacggtacagccaccgaggacttgggagggattttgatggtctggaagtagcgattcttggcggtggccatgctgcagaaggctggattatgcaacagttccaccctcaccttaagttcctcctgttcacggtagttgaagagcacagctctgatctccacctgttcgttgcgcactacagagtagggcagccgcaggtcaatgaagaagtcctgcatcactctgatctcataggggtctgccacacagatccctttcttgtctgacaagctcactgccagaatctcccaggtggtgatggaatctttgagaaagatgttcatgaccttcgtagagattccatttttctctggttctttcaactcttctatggtccacaaccagctctgtgggaagtggcttctagagataatatcttcttctggaattatgtcttcctccaattcactcctggccaggcccagcacgtggtctcttctgtgttgttcacgcagcttggtgatgtggttgcagcagtctatgaaggcctttatgcagttctcgccctgggtgatgaggcgtgcccggcgctggcagctgtatctcatagggatatcccgcataccatcctcacaacacttccgaagacccttgtcagtgtactgaccagctttgtccatccttctttccatcaactgtactgagcgacggcggcgggctgctggcttggtgcactcaagatctgctctctgttcagtctgcagtccttggcttgtcttgaaggccaggcctgcatccatgaagacaccagcatagttcttcccactgcctggggtgcagccaatgtctgccttctctaccacatcccagatcttgctctgtgtgagtttgttcttcttgttcagcacaaacactcccttgtccacagccactagccccactcgggccccctggtttccttcaatcctgagtgtcgtttgttgcccaggtgcgagatggttatctcttgggtcacccttcaccaccagcgtgccaatacaggaatccttcacatccacccacacagagtcagccaccacctccctctggccactagctccaatcagggtgtagtaagccaccaggcgaaatgaaggaataaactctggagtgatgggcagggacaagaccaccaggtcctggccaggctcccgaacctggcggcctgccttcaggagcttccccttgttcataaccaggtaggtgtagtatcggatcttggcctcatggcctgggtctgtgcgcaggtggaagttgacattgaggttgtcccccggcttgagctccattcgtgacactgacaagtgtaggtagttgttggagttgtgcatagtgctgtagggatgggcctccattgtcttggtggcctgccgtgattctgggagagtgtccttcttggtgcggactgtgatggtcaggggttggcggctgttgggtgtgttgatgcttagcttggccacgccatcatcttgggtgagagcctttgcattagatccctgagtgaccaccagcactttgctggccggagagccatcggggttggtcacgaacaccatgaggtcaaagggcatggctggcttgaagaatttgggtgtcttggtgaagtggatctggtacggggaagtgacaatcgggatcccactgcgctctgcctctaccatgtcactacctgagtgcaggatgacagtgacggagacatacagggacttccccaccagggcgtcggcgttggaaggccgtaccccctccatcagcaccttccgggtcagcactgcatcccccacaccatcctcaatcactacgcgcgtgagggagtgggccagagaaatcttcttatcgccatcctggaccccaaaaatcacgaaggctgtcccgtccacgtttttcccgtacaggaacttggctatgatggaaacttccaggccatttgggtcatcgatgtaataaaatgtctctgtgggctccacccggacctcaaaactgggcagcacgtattccttcacctcaaactctgcggagaagatctgcttcggcgcatgttcgtaaaaggctcggatcttccactgccccatgttgaccagttcaggaatgttccaagacaaaggcaagatgccgtgttggttgttggaagacagaatgtctctcttgacaggaatgccatcgggggtctcaatgaggatgacgactgtcttgcccacgggcagtaggttgttgtccacagtgaagatccgatataagacagtggagccaggggtgtagatggtcttgtctgtctggatgaagaggtacccactctggaagcttaccatcactgctttctccaccaccgtttccccgaagtttgccaccactgtcacgtacttgtgcccctccttatctgagttgaattccttactggctggaatcttgatggagacgcttctcagatgtccactggctcctgtcaacactgtcttctcactggtcagcacttgcctctttaggaagtcttgcacagtgactgtgactgggatgtcaccctgagcatcgtgggcctccagtacgatggtctcttcgctctccagccgtaggacattgggagtaatgatggaatacatggggatccccagagctaatggggagctggccaacagcagcagtagcactagtagctgggaccctgaagctggtcccatagtgaaggaaaaaggtggaaggaatgaaggggtaaggggcaggggtgggcagaggcgagctggggctgtagccgctggctctttatatggctctcctctct

SEQ ID NO: 19 - DNA, 5091 bp, Rattus norvegicus
  source 1..5091: mol_type = genomic DNA
ttttttttttttttttttgatgggtaaaatacaactgaagctttattggaggttgtggtcagttggggcagccgaaaaccaccattgtttctgtgaatgccccgaggtcttcgcactgtttctggttcttctgatcctgacattcctctgcctcgggccagtgctccacccacgtgtccttcccaatgatgtagctggtattgggcttttctccccagaggtcggaggagaggccccacatgaggtactgcttccctttctgcagctttagggcgtttctgcacttgacgtggctgatgaaccttcgttcctgacctgcctgcacctcatctgagcctgacttgatgacctgctcgatggtcatgatgtactcatcaaaatcatccgacagctctatcgtcgttagcttggtcttgtacacgtagtccactccaggctcacaagccttgtctagtcgttcattcaggctgacctgatcctgtgactgatgcatgaagcagttctcctctgcacagcggcacatttcattgtggcacagcttgctcagcattccatcgtccttctccggatgatagaaccgggtgcatgactcctctagattgtagtaggagtagaccttgaccgaccccggctggataagtcccacgttaaagaactggtggactttgaaggacaggcagtcttcttcggagtgtgagatcttttctaggtagatgatgagggtgttcttgttggagaaggctttgtccatctcatacttggaaatgtatctgtctactccagagctcagcagttccaggtcgtttgtgtctggaataaagccagtcatcatggagatgtccaggatggacatagtagcatccacgtctcccaagtacctggtgcagatgtcaaggatcatagaactcttggcatcctggggcttcttggctgtctcaggggctggttttatggtgaccctgaggtcaaacttcttgcaggtggctttgcctttgactttggcgtgatacactgtcaccaccgacagtgtgccttggccttttcctttggctgtcagagaaaagccctcattctgcttggtctcttctgatctcaggagactgccactttcccatagcaggcgaaacacagttggggagctgcggctggggaggtggagggacacatccatgttcaagtccttgtggtcagggacatctgtttggtattgagccaaggcttggaataccatgaaggtagcctgcgtggagccatagccacctccgtagtatctttgctcgttgagccagcgcaccacaggaggcacagagtcaaagtctttcagcagcagcagggccaggagggcgtaggaggtggcctccacattgtagagctgctggccaggctcctcccagcggttccgatctttggctgtgttcagaaacttggtgaggtaaggttcctccagtttgttcatcagggccagggcatacccagcaatggctactgtgtatggtctctgcaggttcaggtaactggcttcaagatactcccctgccttgttgatgctcccgggaaggctgttgacctgcccctcacagatatctctggcttcctgcagtgcgatgaggacaaaggctgtaagcgacacatctgcctccttggtgttccggaagccaccaatcatttcttggtgaatcactggtccgtcctcctgaaagacaccatctggcttctgtttctccagaatcagccatttgacagccccacacaggacctgagagtcgatggcgatgaggttggcagccagagagaagaccttgaccacataggctgtcagccaggtgctgggaggccggttgttgaaggcagcataggcagagctgggctgtttgaaagccagctgctgggtgtaccctttcttgatgagctccagagcttcttgcctcttctctaggccgaatttctcccactgttcggtctgatccagatagtgtactgcaatgaccgtgggtgtcatgccaatcatgttctgctccccacagccagagggggtcacgatcaggtgtttcagccgctccccgtccacagcgtcctcggccatctgagccaccggggtcccttgcaggagaattctggtctcagaatctgtgtctggcacttggtcactgaggtctgctgcaggtacatcctccctctgcactcccccttgaccgaggtgttctggatccagtgtacggacagccacagttttgttgactctcattccttctggcacgaccttcagtatcttcttgacaccatcactgatgaagtggttgaagacggcggccttgacctccacctcctggaggccgatcttcaaggggacaatgacataaggcacagccacagaggacttgggagggatttcgatggtctggtagtaccgcttcttggcagtggccatgctgcagaaggctgggttatgcaacagttccacccttaccttaagtttctcctgttcacggtaattgaagagcacagctctgatctccacctgttcattgcgcaccacagagtagggcagtcgcaggtcaatgaagaagtcctgcatcactgtgatctcataggggtctgccacacagatccctttcttgtcggacaagctcactgccagaatctcccaggtggtgatggaatctttgagaaagatgttcatgaccttcgtagagattccatttttctctggttctttcaactcttctatggtccacaaccagctctctgggaagtggcttctagagataatatcttcttctgggattatgtcttcatccacatcactcctggccaggcccagcacatggtctcttctgtgctgctcacgaagcttggtgatatagttgcagcagtccatgaaggccttcaggcagctctcgccctgggtgatgaggcgagcccggcgctggcagctgtacttcatagggatatcacgcatgccatcctcacaacacttccgcagacccttgtcggtgtactgaccagctttgtccatcctcctttccatcaactgcactgagcgacggcggcgggcagctggcttggcgcactcaggatcttctctctgatcagtctgcaggccttggtttgtcttgaaggtcaggccagcatccatgaagacacccgcatagttcttcccactgcctggggtgcagccaatgtctgccttctctactacatcccagatcttgctctgtgtgagtttgttcttcttgttcagcacaaacacccccttgtccacagccactagccccactcgggccccctggttcccctcgatccttagtgtcgtttgatgcccaggcgcgggctgtcggttatctcttgggtcacctttcaccaccagcgtgcctacacaggagtccttcacatccacccacactgagtcggccaccacctccctttggccattagctccaatcagggtgtagtaagccaccaggcggaaggaaggtataaattctggagtgatgggcagtgacaagaccaccaggtcctggccaggctcccgaacctgacggcctgccttcagtaacttccccttgttcataaccagataggtgtagtatcggatcttggcctcttggccagcgtccgtgcgcaggtggaagttgacattgaggttgtccccaggcttgagctccacccgagacactgacaagtgcaggtagttgttggaattgtgcatagtgctgtagggctgggcctgcatcgtcctggtggcctgccgcgcgtccgggataccctccttcttggtgcggaccgtgatagtcaggggttggcggttgttgggtgtgttgacgctcagcttggccacaccatcatcctgggtgagagcctgcgcgtcggatccctgagtgactactggcactctgcgggctggagagccatcagggttggtcacaaacaccatgaggtcgaaaggcatggctggcttgaagaatttgggtgtcttggtgaagtggatctggtacggggaagtgacaattgggatcccactgcgctctgcctctaccatgtcgctacctgagtgcaggataacagtgacagagacgtacagggacttccccactagggcttctgggctggagggccgtaccccgtccatcagcacttttcggctgagcactgcctcccctgaaccatcctcgatcagcacgcgggtgagggactgggccagagaaatcttcttatcctcatcctggaccccaaagatcacgaaagctgtcccgtccacgttcttcccatacaggaatctggctgtgatggaaacttccaggccctttgggtcatcgatgtaataaaatttctctgtaggctccaccaggacttcgaaactgggcagcacgtattccttcacctcaaactctgcagagaaggtctgctttggtgcatgttcatagaaggctcggatcttccactgccccatgttgaccagttctggaatgttccaagacaaaggcaagatgccatattggttgtgggaagatagaatgtctctcttgatgggaacgccgtccggggtctcaatgacgatgacgactgtcttgcccacaggcaataggttgttgtccacagtgaagatccgatagaaaacagtggagcctggggtgtagatggtcttgtctgtctggatgaagaggtaaccactctgaaagcttactagcaccgctttctccaccactgttgccccgaagtttgccaccactgtcacgtacttgtgccccttatctgcattgaattccttactggctggaatcttgatggagaccctgttcagatgtccagtggctcctgtcaacactgtcttctcactggtcagcacttgcttctttaggaagtcttgcacagtgacagtgactgggacatcaccctgagcatcatgggcctctagtatgaaagtctcttcactctccagccgcaggacattgggagtaatgatggagtacatggggctccccagagctagcagggagctggccaacagcagcagtagcactagtagctgggaccctgacgtgggtcccatggtaaaggacaaaggtggaaggagtgaggggtaaggggtag

SEQ ID NO: 20 - DNA, 2693 bp, Homo sapiens
  source 1..2693: mol_type = genomic DNA
tttcctttttttaaagagttctcagacctttcaaaaggtctcagaccctaagcaccatgttctctaatgaataagattgtacaaccaatgttaatcagcttctcaggtaggtaaccttaccttatacaactcataaggctaggtattaagttggactatataaaattgatgttttttcttgtaaaatatgatcaaatagaaggaatttcacataatttaaactaatagtttatgttcattctattctgctactgaacactatctatattattcctttcatctaactggatttttgtacccattaaccaactcctctttatctcccttcagtcctctggtaaactagtagtttttggttacaaatataatatgttttcccccttggacacatggatttaaatcgtagagctaagactagtaaaagcaactgctgtgcacgtggctggtgctcagcatttgctgaatgaatgtatgcacacctaagcaaataaccaaactaaacataacaatgtaaataagagttaaattgcatggtacagacgtgtggtcatggacctggcagaatatgttaaccatacaaagccgtttgaaaattactttgaagttttttaaaccaacattctgtttttaatttaattttgtttttttttagaagagattggcattttccgtgggataaagcagttctggcgtatttcactgttgacttctcattagggaacaaaaaatggaaacatcacaggagtttaaggaagaaaaatttaaaaaaaaattatagacctaagagagaagagacttcagaggttggtaggattttcatgaagcatgttgctatttacttggcagctaagattatcttcaggggtaggatctgaaggtactagtgttttcttcttccactggagctcagagaagccaacagctctatttttcattggggaactctagggctggcaatccttcagaaattttttgtttactgatttcacaggcaattccctcaaatttgaatgggcaggcacacaaacactttccatccattagaatcactgtacctccattttggcatgtgtggcattttcttacactaaattcattgatatagtcttcaatggctctttccaagttttgtttctttaggtgtgcatttttcattttcactggaaccagattatatataggagacagtttttgactaatgagaacaggagcatcatttatggaagaggcccagttgacaaagtcagtcacatcaatcacggttcctcggagaagcttttctttcagttcaaatgcatattttctggttccacctcttatgagtgaaacaacatcatctatgaggttttcactggtgatgtttacagctctaccctctcccctctttacacaatcatctttattaaattcagctccaacagagatttcagagaaagccagagatacatccagatgatacccaaggcatctctttatgtcttttagttcaacacctttccgcttcatggaagctttatccaaaacatatattagttcatagagtcctcctagagacccagagctactgtagtgagttccataggtttccaaaaaggcaaaatattctcccttttcataggtagttggcaaagcttttatatcatccacaaaagttgttgtgagcacaacatcgcgatttctcattacaaatcttcccagatgaatttctcctttcacatgcagaaacattttttccttctttgaagaatatgacaaaaatagttggtaagtttcatttttggaatatgaaaaccgaaaactacccttgccatgtaaagaaattgaggaggctgtttcctcacaacattgttcagctttatttgtttcagtgggtgtaaattttagagatatagctgcattaaaatttgatgtcttctcttggatgatacttttaaatgcttcaatttgttcttcgtaatgttcggttctgaaatttttctcgcctttggtttcatagatcaaagaagccacgttccaaggtcttcggtagtatgtcagagtgtttccatcccgatcccggttacagagtccattgtagaactcattgtcaaaaggtgtgcttaggggatccatccctaaaatgttgatcccatagcctgctgttcgtgccagctcagactcttctaccactctgtctctgcaggggggacggggctcactttcacaatcatcctcatctgaaaagtctccgcagtcattgtcaccattacaccgaagtcgcatctttatgcatctgcctgtactgcattgaaagtcatttccgcagtcatcctcagcatcctcacagggctctgtgggcacacactgtcgtctgtctcccacagcgtcggtgcatcttttcccattaaattgtccaaagacctcaatgcttcttgaacgaaacatttgtctgagacaaggatcgcattgtgaccattcactccaggggctcattctgcagtctatgtgtgatgcagagccactgctttctgttagctctgggtcataactggtcgtgtactgtgctgtgaggatgcttatttctaaaatgcagattgcaactgcaaagctccggcaggctgacatgctgctcttgctgggtggctgcgagtggggtggcagggcaggtctggtaaggcatttatttgcaaagggccagaggacagggaacaagc

SEQ ID NO: 21 - DNA, 1767 bp, Mus musculus
  source 1..1767: mol_type = genomic DNA
ctttttttttcccccttccatgtgaaccagggtttgctttgtttcctgaaggctatattttttgatggatttcgcaggccattcccctaaacatcattgggcaggagcacaggcactgcccatccagaagaattatagtacctccatttagacatgggtagcaccttttagtactgaattcatctatatagtcttcaacagccttttccaaattttgcttctttatgtatgcatcttttattttcaaaggaatgagattatatataggggacattctttgactgatgagagctggagcgtttgccagggacgaggcccagttggcgaagtcagtcttatcaaatgtcttgtctcctctgagaatcttctctttcaggagaattgcttgctccctagtccctcctcttatgaatgaaatgacatcatctatgatgttatcgcgggtgatgtttacagttttcccattatctgtctttatgcaaccatccgcattaacacttgctgtgactgatgcatcctttaagtcgtcttgtagaggaatacgtaaatccatattaaatccaagacaatgttttacatcattcaggtcaacacctttctctttcatggaagctttatccaagacatagacaatttcatattgtcctcccagggacccagaggtactgtagtgagtcccataggtttccaaaaatccaaaatattctcccttttcataggaagttggtagagcttttacatcatccaggaaagttgacctcagcacaacatcccgattcctcattacaaatctccccagttggaccactcctctcaagtgcacaaacatctttttcgactgcgaaaaataagatgatagtcttcgaaaattttttcccatgaaatatgaaaatttaaatttagctgaaatgtttgtaggttttgaagagtgttctgctggggagacttccccagctcccttttcaggtacttcggtggctgaaaattttagggcaaaatctgcattaaaattcgaggtcttctctcggttgatggctttgaatacttccaagtgttcgtcatagttctcagttctgaaacttttatcagccttggtttcatagatcagagaaactacattccaaggtttgcgatagtatgtcttttcgtctcgtacccggtcacagagtccgttgtagaactcattgtcaaaaggtgttctcaggggctccatccctaagatgttgatcccatagcctgctgttagtcccagctctgattcttccgctactcggtcacggcatggggtgcgtgggtcatcgtcacagtcattctcatcagaataatctccacagtcgttgtcaccattacacagaagtctcctctttatgcacctgcctgtctcacactgaaagtcatttccacagttttcctgtatctcttcacactcctgggtgggttcacagccttgtctgtctcccaaaacatcaacacagcttttcccattaaactgtccgaaggctaaaatgcttcttgagcgaaacctttgtttgaggcaaggatcacactctgaccaattgctccatgggctcattctgcagtctatcggtatgggatagtgttgttcttgttcttctctggaaacgggtattggcatctgtgcattgacacccaaggcaaagatggcaagggctaaggtgatggccatgcctgaggccatgctgctcctcctggggagccctggaggcttgcaaagcattcctttgcagccggaggacaaggggcagt

SEQ ID NO: 22 - DNA, 2083 bp, Rattus norvegicus
  source 1..2083: mol_type = genomic DNA
tgtttttaatttaactctgttttattagcgagagattggcattgcctgtgggaaaaggcagtcctggcatatctcactgccgattcttcattagggataaaaaaaaaaatggaagcattataggcattaaagaggggagaaaggcactgtagacctgaaacagagacgacatcagaggttggtaggatttccatgaagcaagctgctttctacttggcagtgaggattcgctctagggtaggatgctaagttggaaagtcctggggttttttcttttctctctctcttctctctcctctctcttcttctttttttgtccttttttccaccttccatgtgaaccaggttttgctttgtttcctgaaggctatctttgtttactgatttcgcaggcaatccccttaaacttgattgtgcaggagcacatgcactgtccatccagaagaattgctgtgcctccgttttgacatgggtagcactttctagcactgaattcattaacatagtcttcaatagccttttccatattctgtttctttgcgtatgcatctttcattgtcaaaggaatgagattatagataggggacagtttttgactaatgagagctggagcgtcatccaaggatgaggcccagttgatgaagtcgttcacatcaatcgtcttggctcctctgagaagcttctctttcaggagaactgcttgcttcctggtccctcctcttatgaatgaaataacatcatctatgatgtgatcgcggctgatgtttactactttaccatcccctgtctttaagcaatcactgtgattaacattggctgtcaatgatggtccttctaaggcagtttgtagaggcgtatatagagaaacatccaggttaaacccaagacaccgctttacgtcgctgagttcaacacctttctctttcatggaagctttatccaagacatagatcagttcgtagagccctcccagggacccagagctactgtagtgagtcccataagtctccaaaaacccaaaatattcgcccttttcataggaaactggtaaagcctttacatcatccaggaaagttgtcgtcagcataacgccccgattcctcatgacaaatctccccagttgaatcattcctctcacgtgcagaaacatctttttcgtctgtgacaagtaggatgacaatcgttgaaaattttctttcttgaaatatgaaaattgaaaatcaacagaagagtctttaggctttgaagagtttttttctgggctgacttcatcaactccaactttttttataggtgcttcagtgattgtgaattttagagctaaattagcattaaaactcgtggtcctgtctcggacgatggttttgaacatttcaaactgttcttcataattctcagttctgaaatttttgtcagccttggtttcataggccagaaatgctacgttccaaggtttgcgatagtatgtcaaagtgtttccgtcccgtacccggtcacagagtccattgtagaactcattgtcaaaaggcgtgcccaggggatccatccctaagatgttgatcccatatcctgctgttcgtcccagttccgattcttctaccacccggtcacggcacgggaggcgcgggtcactttcacagtcactctcatcagaaaaatctccacagtcgttgtcaccattacacagaagtttcctctttatgcacctgcctgtttcacactgaaagtcattcccacagttttcctgtacctcttcacactcctgagtgggttcacaatgttgtctgtctcccaaagcatcagcacagctttttccctgaaactgtccaaagacttccatgcttcttgagcgaaacctttgtttgaggcaaggatcacactgtgaccactgactccatgtgctcattctgcagtctattggtaggagggcgtctgctgatggctcttcccggggagtgggctctggggcctgtgcattgatctccaaggcaaagattgcaatggctagggtgatggtcacgcctgaggccatgccgctcctcctaggcagccctggagtcctgagaagcatttctttgcaacc

SEQ ID NO: 23 - protein, 16 aa, unidentified
  REGION 1..16: note = source = /note="Description of Unknown: RFGF hydrophobic membrane translocation peptide"
AAVALLPAVLLALLAP

SEQ ID NO: 24 - protein, 11 aa, unidentified
  REGION 1..11: note = source = /note="Description of Unknown: RFGF analogue peptide"
AALLPVLLAAP

SEQ ID NO: 25 - protein, 13 aa, Human immunodeficiency virus
GRKKRRQRRRPPQ

SEQ ID NO: 26 - protein, 16 aa, Drosophila sp.
RQIKIWFQNRRMKWKK

SEQ ID NO: 27 - DNA, 2289 bp, Macaca fascicularis
  source 1..2289: mol_type = genomic DNA
atggggagcagtctcagcccccagctctacctgatgcccttcatcttgggcctcttatctgcaggtgtgaccaccactccattgtcttcggcccagcctcaaggatcctgctctctggagggggtagagatcaaaggtggctccttccgacttctccaagagggccaggcactggaatacgtgtgtccttctggcttctacccgtaccctgtgcagacacgtacctgcagatccacggggtcctggagcaccctgcagactcaagatcgaaaaactgtcaagaaggcagagtgcagagcaatccgctgtccacgaccacaggacttcgagaacggggaataccggccccggtctccctactacaatgtgagtgatgagatctctttccactgctatgacggttacactctccggggctctgccaatcgcacctgccaagtgaatggccggtggagtgggcagacagcgatctgtgacaacggagcggggtactgctccaacccaggcatccccattggcacaaggaaggtgggcagccggtaccgccttgaagacagcgtcacctaccactgcagccgggggcttaccctgcgtggctcccagcggcgaacatgtcaggaaggtggctcttggagcgggacggagccttcctgccaagactccttcatgtacgacacccctcaagaggtggccgaagctttcctgtcttccctgacggagaccatagaaggagtcgatgccgaggatgggcacagcccaggggaacaacagaagcggaggatcatcctagacccttcaggctccatgaacatctacctggtgctagatggatcagacagcattggggccggcaacttcacaggagccaaaaagtgtctagtcaacttaattgagaaggtggcaagttatggtgtgaagccaagatatgctctagtgacatatgccacataccccagaatttgggtcaaagtgtctgaccaagagagcagcaatgcagactgggtcacgaagaagctcagtgaaatcaattatgaagaccacaagttgaagtcagggactaacaccaagagggccctccaggcagtgtacagcatgatgagttggccagaggacatccctcctgaaggctggaaccgcacccgccatgtcatcatcctcatgaccgatggattgcacaacatgggcggggacccaattactgtcattgatgagatccgggacttgttatacatcggcaaggatcgtaaaaacccgagggaggattatctggatgtctatgtgtttggggttggacctttggtggaccaagtgaacatcaatgctttggcttccaagaaagacaatgagcaacatgtgttcaaagtcaaggatatggaaaacctggaagacgttttcttccaaatgattgatgaaagccagtctctgagtctctgtggcatggtttgggaacacacgacgggtaccgattaccacaagcaaccatggcaggccaagatctcagtcactcgcccttcgaagggacatgagagctgtatgggggctgtggtgtctgagtactttgtgctgacagcagcacattgttttactgtggacgacaaggaacactcgatcaaggtcagcgtggggaagaagcgggacctggagatagaaaaagtcctatttcaccccgactacaacattagcgggaaaaaagaagcaggaattcctgaattttatgactatgacgttgccctgatcaagctcaagaataagttgaattatgacccgactatcaggcccatttgtctcccctgcaccgagggaacaactcgagctttgaggcttcctccaactaccacttgccagcaacagaaggaagagctgctccctgcacaggatatcaaagctctgtttgtgtctgaggaggagaagaagctgactcggaaggaggtctacatcaagaatggggataagaaaggcagctgtgagagagatgctcaatatgccccaggctatgacaaagtcaaggacatctccgaggtggtcacccctcggttcctttgtactggaggagtgagtccctatgctgaccccaatacttgcagaggtgattctggcggccccttgatagttcacaagagaagtcgttttattcaagttggtgtcatcagctggggagtagtggatgtctgcaaaaaccagaagcggcaaaagcaggtacctgctcacgcccgagactttcacgtcaacctcttccaagtgctgccctggctgaaggagaaactccaagatgaggatttgggttttctc

SEQ ID NO: 28 - DNA, 4989 bp, Macaca fascicularis
  source 1..4989: mol_type = genomic DNA
atgggactcacctcaggtcccagcctgctgctcctgctactaatccacctccccctggctctggggactcccatgtactctatgatcacccccaacgtcttgcggctggagagtgaggagaccgtggtgctggaggcccacgacgcgaatggggatgttccggtcactgtcactgtccacgacttcccaggcaaaaaactggtgctgtccagtgagaagaccgtactgacccctgccaccagccacatgggcagcgtcaccatcaggatcccagccaacaaggagttcaagtcagaaaaggggcacaacaagttcgtgactgtgcaggccaccttcggggcccaagtggtggagaaggtggtactggtcagccttcagagcgggtacctcttcatccagacagacaagaccatctacacccctggctccacagttctctgtcggatcttcaccgtcaaccacaagctgctacccgtgggccggacggtcgtggtcaacattgagaacccggacggcatcccggtcaagcaggactccttgtcttctcagaaccaatttggcatcttgcccttgtcttgggacattccggaactcgtcaacatgggccagtggaagatccgagcctactatgaaaattcgccgcaacaggtcttctccactgagtttgaggtgaaggagtacgtgctgcccagtttcgaggtcatagtggagcctacagagaaattctactacatctataaccagaagggcctggaggtcaccatcaccgccaggttcctctatggaaagaaagtggagggaactgcctttgtcatcttcgggatccaggatggcgagcagaggatttccctgcctgaatccctcaagcgcatccagattgaggatggctcaggagacgccgtgctgagccggaaggtactgctggacggggtgcagaatccccgaccggaagacctggtggggaagtccttgtacgtgtctgtcaccgttatcctgcactcaggcagtgacatggtgcaggcggagcgcagcgggatccccatcgtgacctctccctaccagatccacttcaccaagacgcccaagtacttcaaaccaggaatgccctttgacctcatggtgttcgtgacgaaccccgatggctctccagcctaccgagtccccgtggcagtccagggcgaggacgctgtgcagtctctaacccagggagacggcgtggccaaactcagcatcaacacacaccccagccagaagcccttgagcatcacggtgcgcacgaagaagcgggagctctcggaggcggagcaggctaccaggaccatggaggctcagccctacagcaccgtgggcaactccaacaattacctgcatctctcagtgccacgtgcagagctcagacctggggagaccctcaacgtcaacttcctcctgcgaatggaccgcacccaggaggccaagatccgctactacacctacctgattatgaacaaaggcaagctgttgaaggtgggacgccaggtgcgagagcctggccaggacctggtggtgctgcccctgtccatcaccaccgacttcatcccttccttccgcctggtggcctactacacgctgatcggcgccaacggccagagggaagtggtggccgactccgtgtgggtggacgtcaaggactcttgcgtgggctcgctggtggtaaaaagcggccagtcagaagacaggcagcctttacccgggcagcagatgaccctgaagatagagggtgaccacggggcccgggtgggactggtggctgtggacaagggcgtgtttgtgctgaataagaagaacaagctgacgcagagtaagatctgggacgtggtggagaaggcagacatcggctgcaccccaggcagtgggaaggattacgctggtgtcttctcggatgcaggcctgacctttgcgagcagcagtggccagcagacggcccagagggcagaacttcagtgcccacagccagccgcccgccgacgccgttccgtgcagctcgcggagaagagaatggacaaagttggtcagtaccccaaggagctgcgcaagtgctgcgagcacggtatgcgggagaaccccatgaggttctcatgccagcgccggacccgttacatcaccctggacgaggcgtgcaagaaggccttcctggactgctgcaactacatcactgagctgcggcggcagcacgcgcgggccagtcacctgggcctggccaggagtaacctggatgaggacatcatcgcagaagagaacatcgtttcccgaagtgagttcccagagagttggctgtggaagattgaagagttgaaagaggcaccgaaaaacggaatctccacgaagctcatgaatatatttttgaaagactccatcaccacgtgggagattctggccgtgagcttgtcagacaagaaagggatctgtgtggcagaccccttcgaggtcacagtaatgcaggacttcttcatcgacctgcggctaccctactctgttgttcgaaacgagcaggtggaaatccgagctgttctctacaattaccggcagaaccaagagctcaaggtgagggtggaactactccacaatccagccttctgcagcctggccaccgccaagaggcgtcaccagcagaccgtaaccatcccccccaagtcctcgctgtccgttccttatgtcatcgtgcccctaaagaccggccagcaggaagtggaagtcaaggctgccgtctaccattttttcatcagtgacggtgtcaggaagtccctgaaggtcgtgccggaaggaatcagaatgaacaaaactgtggctgttcgcacgctggatccagaacgcctgggccaggaaggagtgcagagagaggacgtcccacctgcagacctcagtgaccaagtcccggacaccgagtctgagaccagaattctcctgcaagggaccccggtggcccagatgacagaggatgccatcgatgcggaacggctgaagcacctcatcgtgaccccctcgggctgcggagaacagaacatgatcaccatgacgcccacagtcatcgctgtgcattacctggatgaaacggaacagtgggagaagttcggcccggagaagcggcagggggccttggagctcatcaagaaggggtacacccagcagctggccttcagacaacccagctctgcctttgcggccttcctgaaccgggcacccagcacctggctgaccgcctacgtggtcaaggtcttctctctggctgtcaacctcattgccatcgactcccaggtcctctgcggggctgttaaatggctgatcctggagaagcagaagcccgacggggtcttccaggaggatgcgcccgtgatacatcaagaaatgactggtggattccggaacaccaacgagaaagacatggccctcacggcctttgttctcatctcgctgcaagaggctaaagagatttgcgaggagcaggtcaacagcctgccaggcagcatcactaaagcaggagacttccttgaagccaactacatgaacctacagagatcctacactgtggccatcgctgcctatgccctggcccagatgggcaggctgaagggacctcttctcaacaaatttctgaccacagccaaagataagaaccgctgggaggagcctggtcagcagctctacaatgtggaggccacatcctatgccctcttggccctactgcagctaaaagactttgactttgtgcctcccgtcgtgcgttggctcaatgaacagagatactacggtggtggctatggctctacccaggccaccttcatggtgttccaagccttggctcaataccaaaaggatgtccctgatcacaaggaactgaacctggatgtgtccctccaactgcccagtcgcagctccaagatcatccaccgtatccactgggaatctgccagcctcctgcgatcagaagagaccaaggaaaatgagggtttcacagtcacagctgaaggaaaaggccaaggcaccttgtcggtagtgacaatgtaccatgctaaggccaaaggtcaactcacctgtaataaattcgacctcaaggtcaccataaaaccagcaccggaaacagaaaagaggcctcaggatgccaagaacactatgatccttgagatctgtaccaggtaccggggagaccaggatgccactatgtctatactggacatatccatgatgactggcttcgttccagacacagatgacctcaagcagctggcaaacggcgttgacagatacatctccaagtatgagctggacaaagccttctccgataggaacaccctcatcatctacctggacaaggtctcacactctgaggatgactgtatagctttcaaagttcaccaatattttaatgtagagcttatccagcctggtgcagtcaaggtctacgcctattacaacctggcggaaagctgtacccggttctaccacccggaaaaggaggatggaaagctgaacaagctctgtcgtgatgagctgtgccgctgtgctgaggagaattgcttcatacaaaagttggatgacaaagtcaccctggaagaacggctggacaaggcctgtgagccaggagtggactatgtgtacaagacccgactggtcaaggcccagctgtccaatgactttgacgagtacatcatggccattgagcagatcatcaagtcaggctcggatgaggtgcaggttggacaacagcgcacgttcatcagccccatcaagtgcagggaagccctgaagctggaggagaggaaacactacctcatgtggggtctctcctccgatttctggggagagaaacccaatctcagctacatcatcgggaaggacacctgggtggagcactggcccgaggaggacgaatgccaagatgaagagaaccagaaacaatgccaggacctcggcaccttcactgagaacatggttgtctttgggtgccccaac

SEQ ID NO: 29 - DNA, 2955 bp, Macaca fascicularis
  source 1..2955: mol_type = genomic DNA
cccaaattgacaaaaaccctgaatgcagacaaacaatacttgttccctgtcctctggccctttgcaaataaatgccttacccgacctgctctgccaccccactcgcagccacccagcaagagcagcatgtcagcctgctggagctttgcagctgcaatctgcattttagaaataagcgtcctcacagcagagtacacgcccagttatgacccacagccaacagaaagccgtggttccgcatcgcacatagactgcagaatgagcccctggagtgaatggtcacaatgcgatccttgcctcagacaaatgtttcgttcaagaagcattgaggtcttcggacaatttaatgggaaaagttgcaccgatgctgtgggagacagacgacagtgtgtgcccacagagccctgtgaggatgctgaggatgactgcggaaatgactttcaatgcggtacaggcagatgcataaagaggcgactcctgtgtaatggtgacaatgactgtggagacttttcagatgaggatgattgtgaaagtgatccccgtcccccctgcagagacagagtggtagaagagtctgagctggcacgaacagcaggctacgggatcaacattttagggatggatcccctaagcacaccttttgacaatgagttctacaatggactctgtaaccgggatcgggatggaaacactttgacatactaccgaagaccctggaacgtggcttctttgatctatgaaaccaaaggcgagaaaaatttaagaaccgaacattatgaagaacaaattgaagcatttaaaagtatcgtccaagagaagacatcaaattttaatgcagatatatctctaaaatttacacccactgaagcaaataaagttaaaactgaaaagtcttctgagaaacaagcctcctcaaattctttacgtggccagggtagttttcggttttcatattccaaaaatgaaacttaccaactatttttgtcatattcttcaaagaaggaaaaaatgttcctgcatgtgaaaggagaaattcatctgggaagatttatgatgagaaatcgtgatgttgtgctcacaacaacttttgtggatgatataaaagctttgccaactacctatgaaaagggagaatattttgcctttttggaaacctatggaacccactacagtagctctgggtctctgggaggactctatgaactaatatatgttttggataaagcttccatgaaccggaaaggtgttgaactaaaagatgtaaagagatgcctcgggtatcatctggatgtatctctggatttctctaaaatctctgctggagctaaagctgataaagatgattgtgtaaagaggggagagggtagagctgtaaacatcaccagtgatcacctcatagatgatgttatttcactcataagaggtggaaccagacaatatgcatttgaactgaaagaaaagcttctccgaggaaccatgattgatgtgactgattttgtcaactgggcctcttccataaatgatgctcctgttctcattagtcaaaaactgtctcctatatataatctggttccagtgaaaatgaaaaatgcacacctaaagaaacaaaacttggaaagagccattgaagactatatcaatgaatttagtgtaagaaaatgccactcatgccaaaatggaggtacagcaattctaatggatggaaagtgtttgtgtacctgcccattcaaatttgagggaattgcctgtgaaatcagtaaacaaaaagtttctgaaggattgccagccctagacttcccccgtgaaaaatagaactgttggcttctctgagctccagtggaagaaaagaacactaggaccttcagatcctatccctgaagataatcttagctgccaaagaaatagcaacatgcttcatgaaaatcctaccaacttctgaagtctcctctcttaggtctataattattttttaatttttctttcttaaactcctatgatgtttccattttttattccctaatgaggagtcaagagtgaaatatgccagaactgctttctcccacagacaatgccaatctcttcttaaaaaaacaaaattaaattaaaacagaatgttggtttaaaaacttcaaagtaattgtcaaactgctttgtacggttaacatattctgccaagtctatgaccacacgtctgtaccatgcaatttaactcttatttacattgttatgtttggtttggttatttgcttaggtgtgcatacattcattcagcaaatactgaacaccagccacctgcacagcagttgcttttattagtcttaactctaccatttaaatctatgtgtccaagggggaaaatgtgttatatttgtaaccaaaaactactagtttaccaaaggctggaagggtagtggggaagggagataaagaggagatgattaatacaaaactccagttagatgaaaggaataatatatacagtgttcagcaacacaatagagtgactataaactattagcttaaattatgtgaaattgcctctatttgatcttattttacaagagaaaaacatcaattttatatagtctaacttaatacctaggcttatgagttgtataaggtaacgttacctacctgagaagctgattaacattggctgtacaatcttatccattagagaacatgatacttagggtctgagaccttttgaaaaggtctgaaaactctttaaaaaaaaggaaagaaagaaagaaatgaggaaaaacatatcaaaataaaaaaatgcaaaatcaaatttaataaatgcttagacatcagcatgtgtcatgttaactttattgttactattaatacacatttcacacatttataaataaattatgttactttttctcacttgggagaaattctcaagaatgcatttgattgctgggagataacagtaactaaattacc

SEQ ID NO: 30 - DNA, 2727 bp, Macaca fascicularis
  source 1..2727: mol_type = genomic DNA
atttctggtccctaagtgggtggtctgggcttgttggggaggagctgaggccagaaggaggtactgaaggggagagtcctggaccttgggcagcaaagggtgggacttctgcagtttctgcttccttgactggcagctcagcggggccctcccgcttggatgttccgggaaagtgatgagggtaggacaggcggggcaagctgcaggtgccagaacacagattgcataaaaggccgggagctggtggggggcaggggaagggaatgtgaccaggtctaggtctggagtttcagcttggacactgagctaagtagacaagcaaaacaagccaggacacgccatcctgccccaggcccagcttctctcctgccttctaacgccatggggagcagtctcagcccccagctctacctgatgcccttcatcttgggcctcttatctgcaggtgtgaccaccactccattgtcttcggcccagcctcaaggatcctgctctctggagggggtagagatcaaaggtggctccttccgacttctccaagagggccaggcactggaatacgtgtgtccttctggcttctacccgtaccctgtgcagacacgtacctgcagatccacggggtcctggagcaccctgcagactcaagatcgaaaaactgtcaagaaggcagagtgcagagcaatccgctgtccacgaccacaggacttcgagaacggggaataccggccccggtctccctactacaatgtgagtgatgagatctctttccactgctatgacggttacactctccggggctctgccaatcgcacctgccaagtgaatggccggtggagtgggcagacagcgatctgtgacaacggagcggggtactgctccaacccaggcatccccattggcacaaggaaggtgggcagccggtaccgccttgaagacagcgtcacctaccactgcagccgggggcttaccctgcgtggctcccagcggcgaacgtgtcaggaaggtggctcttggagcgggacggagccttcctgccaagactccttcatgtacgacacccctcaagaggtggccgaagctttcctgtcttccctgacggagaccatagaaggagtcgatgccgaggatgggcacagcccaggggaacaacagaagcggaggatcatcctagacccttcaggctccatgaacatctacctggtgctagatggatcagacagcattggggccggcaacttcacaggagccaaaaagtgtctagtcaacttaattgagaaggtggcaagttatggtgtgaagccaagatatgctctagtgacatatgccacataccccagaatttgggtcaaagtgtctgaccaagagagcagcaatgcagactgggtcacgaagaagctcagtgaaatcaattatgaagaccacaagttgaagtcagggactaacaccaagagggccctccaggcagtgtacagcatgatgagttggccagaggacatccctcctgaaggctggaaccgcacccgccatgtcatcatcctcatgaccgatggattgcacaacatgggcggggacccaattactgtcattgatgagatccgggacttgttatacatcggcaaggatcgcaaaaacccgagggaggattatctggatgtctatgtgtttggggttggacctttggtggaccaagtgaacatcaatgctttggcttccaagaaagacaatgagcaacatgtgttcaaagtcaaggatatggaaaacctggaagacgttttcttccaaatgattgatgaaagccagtctctgagtctctgtggcatggtttgggaacacacgacgggtaccgattaccacaagcaaccatggcaggccaagatctcagtcactcgcccttcgaagggacatgagagctgtatgggggctgtggtgtctgagtactttgtgctgacagcagcacattgttttactgtggacgacaaggaacactcgatcaaggtcagcgtggggaagaagcgggacctggagatagaaaaagtcctatttcaccccgactacaacattagcgggaaaaaagaagcaggaattcctgaattttatgactatgacgttgccctgatcaagctcaagaaaaagttgaattatgacccgactatcaggcccatttgtctcccctgtaccgagggaacaactcgagctttgaggcttcctccaactaccacttgccagcaacagaaggaagagctgctccctgcacaggatatcaaagctctgtttgtgtctgaggaggagaagaagctgactcggaaggaggtctacatcaagaatggggataagaaaggcagctgtgagagagatgctcaatatgccccaggctatgacaaagtcaaggacatctcggaggtggtcacccctcggttcctttgtactggaggagtgagtccctatgctgaccccaatacttgcagaggtgattctggcggccccttgatagttcacaagagaagtcgtttcattcaagttggtgtcatcagctggggagtagtggatgtctgcaaaaaccagaagcggcaaaagcaggtacctgctcacgcccgagactttcacgtcaacctcttccaagtgctgccctggctgaaggagaaactccaagatgaggatttgggttttctctaaggggtttcctgctggacaggggcgcgggattgaattaaaacagctgcgacaaca

SEQ ID NO: 31 - DNA, 5106 bp, Macaca fascicularis
  source 1..5106: mol_type = genomic DNA
ctgctcactcctccccatcctctccctctgtccctctgtccctctgaccctgcactgtcccagcaccatgggactcacctcaggtcccagcctgctgctcctgctactaatccacctccccctggctctggggactcccatgtactctatgatcaccccaaacgtcttgcggctggagagtgaggagaccgtggtgctggaggcccatgacgcgaatggggatgttccggtcactgtcactgtccacgacttcccaggcaaaaaactggtgctgtccagtgagaagaccgtgctgacccctgccaccagccacatgggcagcgtcaccatcaggatcccagccaacaaggagttcaagtcagaaaaggggcacaacaagttcgtgactgtgcaggccaccttcggggcccaagtggtggagaaggtggtactggtcagccttcagagcgggtacctcttcatccagacagacaagaccatctacacccctggctccacagttctctgtcggatcttcaccgtcaaccacaagctgctacccgtgggccggacggtcgtggtcaacattgagaacccggacggcatcccggtcaagcaggactccttgtcttctcagaaccaatttggcatcttgcccttgtcttgggacattccggaactcgtcaacatgggccagtggaagatccgagcctactatgaaaattcgccgcaacaggtcttctccactgagtttgaggtgaaggagtacgtgctgcccagtttcgaggtcatagtggagcctacagagaaattctactacatctataaccagaagggcctggaggtcaccatcaccgccaggttcctctatggaaagaaagtggagggaactgcctttgtcatcttcgggatccaggatggcgagcagaggatttccctgcctgaatccctcaagcgcatccagattgaggatggctcaggagacgccgtgctgagccggaaggtactgctggacggggtgcagaatccccgaccggaagacctagtggggaagtccttgtatgtgtctgtcaccgttatcctgcactcaggcagtgacatggtgcaggcggagcgcagcgggatccccatcgtgacctctccctaccagatccacttcaccaagacgcccaagtacttcaaaccaggaatgccctttgacctcatggtgttcgtgacgaaccccgatggctctccagcctaccgagtccccgtggcagtccagggcgaggacgctgtgcagtctctaacccagggagacggcgtggccaaactcagcatcaacacacaccccagccagaagcccttgagcatcacggtgcgcacgaagaagcgggagctctcggaggcggagcaggctaccaggaccatggaggctcagccctacagcaccgtgggcaactccaacaattacctgcatctctcagtgccacgtgcagagctcagacctggggagaccctcaacgtcaacttcctcctgcgaatggaccgcacccaggaggccaagatccgctactacacctacctgattatgaacaaaggcaagctgttgaaggtgggacgccaggtgcgagagcctggccaggacctggtggtgctgcccctgtccatcaccaccgacttcatcccttccttccgcctggtggcctactacacgctgatcggcgccaacggccagagggaagtggtggccgactccgtgtgggtggacgtcaaggactcttgcgtgggctcgctggtggtaaaaagcggccagtcagaagacaggcagcctttacccgggcagcagatgaccctgaagatagagggtgaccacggggcccgggtgggactggtggctgtggacaagggcgtgtttgtgctgaataagaagaacaagctgacgcagagtaagatctgggacgtggtggagaaggcagacatcggctgcaccccaggcagtgggaaggattacgctggtgtcttctcggatgcaggcctgacctttgcgagcagcagtggccagcagacggcccagagggcagaacttcagtgcccacagccagccgcccgccgacgccgttccgtgcagctcgcggagaagagaatggacaaagttggtcagtaccccaaggagctgcgcaagtgctgcgagcacggtatgcgggagaaccccatgaggttctcatgccagcgccggacccgttacatcaccctggacgaggcgtgcaagaaggccttcctggactgctgcaactacatcaccgagctgcggcggcagcacgcgcgggccagtcacctgggcctggccaggagtaacctggatgaggacatcatcgcagaagagaacatcgtttcccgaagtgagttcccagagagttggctgtggaagattgaagagttgaaagaggcaccgaaaaacggaatctccacgaagctcatgaatatatttttgaaagactccatcaccacgtgggagattctggccgtgagcttgtcagacaagaaagggatctgtgtggcagaccccttcgaggtcacagtaatgcaggacttcttcatcgacctgcggctaccctactctgttgttcgaaacgagcaggtggaaatccgagctgttctctacaattaccggcagaaccaagagctcaaggtgagggtggaactactccacaatccagccttctgcagcctggccaccgccaagaggcgtcaccagcagaccgtaaccatcccccccaagtcctcgctgtccgttccttatgtcatcgtgcccctaaagaccggccagcaggaagtggaagtcaaggctgccgtctaccattttttcatcagtgacggtgtcaggaagtccctgaaggtcgtgccggaaggaatcagaatgaacaaaactgtggctgttcgcacgctggatccagaacgcctgggccaggaaggagtgcagagagaggacgtcccacctgcagacctcagtgaccaagtcccggacaccgagtctgagaccagaattctcctgcaagggaccccggtggcccagatgacagaggatgccatcgatgcggaacggctgaagcacctcatcgtgaccccctcgggctgcggagaacagaacatgatcaccatgacgcccacagtcatcgctgtgcattacctggatgaaacggaacagtgggagaagttcggcccggagaagcggcagggggccttggagctcatcaagaaggggtacacccagcagctggccttcagacaacccagctctgcctttgcggccttcctgaaccgggcacccagcacctggctgaccgcctacgtggtcaaggtcttctctctggctgtcaacctcattgccatcgactcccaggtcctctgcggggctgttaaatggctgatcctggagaagcagaagcccgacggggtcttccaggaggatgcgcccgtgatacatcaagaaatgactggtggattccggaacaccaacgagaaagacatggccctcacggcctttgttctcatctcgctgcaagaggctaaagagatttgcgaggagcaggtcaacagcctgcccggcagcatcactaaagcaggagacttccttgaagccaactacatgaacctacagagatcctacactgtggccatcgctgcctatgccctggcccagatgggcaggctgaagggacctcttctcaacaaatttctgaccacagccaaagataagaaccgctgggaggagcctggtcagcagctctacaatgtggaggccacatcctatgccctcttggccctactgcagctaaaagactttgactttgtgcctcccgtcgtgcgttggctcaatgaacagagatactacggtggtggctatggctctacccaggccaccttcatggtgttccaagccttggctcaataccaaaaggatgtccctgatcacaaggaactgaacctggatgtgtccctccaactgcccagtcgcagctccaagatcatccaccgtatccactgggaatctgccagcctcctgcgatcagaagagaccaaggaaaatgagggtttcacagtcacagctgaaggaaaaggccaaggcaccttgtcggtagtgacaatgtaccatgctaaggccaaaggtcaactcacctgtaataaattcgacctcaaggtcaccataaaaccagcaccggaaacagaaaagaggcctcaggatgccaagaacactatgatccttgagatctgtaccaggtaccggggagaccaggatgccactatgtctatactggacatatccatgatgactggcttcgttccagacacagatgacctcaagcagctggcaaacggcgttgacagatacatctccaagtatgagctggacaaagccttctccgataggaacaccctcatcatctacctggacaaggtctcacactctgaggatgactgtatagctttcaaagttcaccaatattttaatgtagagcttatccagcctggtgcagtcaaggtctacgcctattacaacctggcggaaagctgtacccggttctaccacccagaaaaggaggatggaaagctgaacaagctctgtcgtgatgagctgtgccgctgtgctgaggagaattgcttcatacaaaagttggatgacaaagtcaccctggaagaacggctggacaaggcctgtgagccaggagtggactatgtgtacaagacccgactggtcaaggcccagctgtccaatgactttgacgagtacatcatggccattgagcagatcatcaagtcaggctcggatgaggtgcaggttggacaacagcgcacgttcatcagccccatcaagtgcagggaagccctgaagctggaggagaggaaacactacctcatgtggggtctctcctccgatttctggggagagaaacccaatctcagctacatcatcgggaaggacacctgggtggagcactggcccgaggaggacgaatgccaagatgaagagaaccagaaacaatgccaggacctcggcaccttcactgagaacatggttgtctttgggtgccccaactgaccacacccccattcccccactcccaataaagcttcagttatatttca

SEQ ID NO: 32 - DNA, 2091 bp, Macaca fascicularis
  source 1..2091: mol_type = genomic DNA
ttccctgtcctctggccctttgcaaataaatgccttacccgacctgctctgccaccccactcgcagccacccagcaagagcagcatgtcagcctgctggagctttgcagctgcaatctgcattttagaaataagcatcctcacagcagagtacacgcccagttatgacccacagccaacagaaagccgtggttccgcatcgcacatagactgcagaatgagcccctggagtgaatggtcacaatgcgatccttgcctcagacaaatgtttcgttcaagaagcattgaggtcttcggacaatttaatgggaaaagttgcaccgatgctgtgggagacagacgacagtgtgtgcccacagagccctgtgaggatgctgaggatgactgcggaaatgactttcaatgcggtacaggcagatgcataaagaggcgactcctgtgtaatggtgacaatgactgtggagacttttcagatgaggatgattgtgaaggtgatccccgtcccccctgcagagacagagtggtagaagagtctgagctggcacgaacagcaggctacgggatcaacattttagggatggatcccctaagcacaccttttgacaatgagttctacaatggactctgtaaccgggatcgggatggaaacactttgacatactaccgaagaccctggaacgtggcttctttgatctatgaaaccaaaggcgagaaaaatttaagaaccgaacattatgaagaacaaattgaagcatttaaaagtatcgtccaagagaagacatcaaattttaatgcagatatatctctaaaatttacacccactgaagcaaataaagttaaaactgaaaagtcttctgagaaacaagcctcttcaaattctttacgtggccagggtagttttcggttttcatattccaaaaatgaaacttaccaactatttttgtcatattcttcaaagaaggaaaaaatgttcctgcatgtgaaaggagaaattcatctgggaagatttatgatgagaaatcgtgatgttgtgctcacaacaacttttgtggatgatataaaagctttgccaactacctatgaaaagggagaatattttgcctttttggaaacctatggaacccactacagtagctctgggtctctgggaggactctatgaactaatatatgttttggataaagcttccatgaaccggaaaggtgttgaactaaaagatgtaaagagatgcctcgggtatcatctggatgtatctctggatttctctaaaatctctgctggagctaaagctgataaagatgattgtgtaaagaggggagagggtagagctgtaaacatcaccagtgatcacctcatagatgatgttatttcactcataagaggtggaaccagacaatatgcatttgaactgaaagaaaagcttctccgaggaaccatgattgatgtgactgattttgtcaactgggcctcttccataaatgatgctcctgttctcattagtcaaaaactgtctcctatatataatctggttccagtgaaaatgaaaaatgcacacctaaagaaacaaaacttggaaagagccattgaagactatatcaatgaatttagtgtaagaaaatgccactcatgccaaaatggaggtacagcaattctaatggatggaaagtgtttgtgtacctgcccattcaaatttgagggaattgcctgtgaaatcagtaaacaaaaagtttctgaaggattgccagccctagacttcccccgtgaaaaatagaactgttggcttctctgagctccagtggaagaaaagaacactaggaccttcagatcctatccctgaagataatcttagctgccaaagaaatagcaacatgcttcatgaaaatcctaccaacttctgaagtctcctctcttaggtctataattattttttaatttttctttcttaaactcctatgatgtttccattttttattccctaatgaggagtcaagagtgaaatatgccagaactgctttctcccacagacaatgccaatctcttctaaaaaaaacaaaattaaattaaaacagaatgttggtttaaaaacttcaaa

SEQ ID NO: 33 - DNA, 2289 bp, Macaca fascicularis
  source 1..2289: mol_type = genomic DNA
gagaaaacccaaatcctcatcttggagtttctccttcagccagggcagcacttggaagaggttgacgtgaaagtctcgggcgtgagcaggtacctgcttttgccgcttctggtttttgcagacatccactactccccagctgatgacaccaacttgaataaaacgacttctcttgtgaactatcaaggggccgccagaatcacctctgcaagtattggggtcagcatagggactcactcctccagtacaaaggaaccgaggggtgaccacctcggagatgtccttgactttgtcatagcctggggcatattgagcatctctctcacagctgcctttcttatccccattcttgatgtagacctccttccgagtcagcttcttctcctcctcagacacaaacagagctttgatatcctgtgcagggagcagctcttccttctgttgctggcaagtggtagttggaggaagcctcaaagctcgagttgttccctcggtgcaggggagacaaatgggcctgatagtcgggtcataattcaacttattcttgagcttgatcagggcaacgtcatagtcataaaattcaggaattcctgcttcttttttcccgctaatgttgtagtcggggtgaaataggactttttctatctccaggtcccgcttcttccccacgctgaccttgatcgagtgttccttgtcgtccacagtaaaacaatgtgctgctgtcagcacaaagtactcagacaccacagcccccatacagctctcatgtcccttcgaagggcgagtgactgagatcttggcctgccatggttgcttgtggtaatcggtacccgtcgtgtgttcccaaaccatgccacagagactcagagactggctttcatcaatcatttggaagaaaacgtcttccaggttttccatatccttgactttgaacacatgttgctcattgtctttcttggaagccaaagcattgatgttcacttggtccaccaaaggtccaaccccaaacacatagacatccagataatcctccctcgggtttttacgatccttgccgatgtataacaagtcccggatctcatcaatgacagtaattgggtccccgcccatgttgtgcaatccatcggtcatgaggatgatgacatggcgggtgcggttccagccttcaggagggatgtcctctggccaactcatcatgctgtacactgcctggagggccctcttggtgttagtccctgacttcaacttgtggtcttcataattgatttcactgagcttcttcgtgacccagtctgcattgctgctctcttggtcagacactttgacccaaattctggggtatgtggcatatgtcactagagcatatcttggcttcacaccataacttgccaccttctcaattaagttgactagacactttttggctcctgtgaagttgccggccccaatgctgtctgatccatctagcaccaggtagatgttcatggagcctgaagggtctaggatgatcctccgcttctgttgttcccctgggctgtgcccatcctcggcatcgactccttctatggtctccgtcagggaagacaggaaagcttcggccacctcttgaggggtgtcgtacatgaaggagtcttggcaggaaggctccgtcccgctccaagagccaccttcctgacatgttcgccgctgggagccacgcagggtaagcccccggctgcagtggtaggtgacgctgtcttcaaggcggtaccggctgcccaccttccttgtgccaatggggatgcctgggttggagcagtaccccgctccgttgtcacagatcgctgtctgcccactccaccggccattcacttggcaggtgcgattggcagagccccggagagtgtaaccgtcatagcagtggaaagagatctcatcactcacattgtagtagggagaccggggccggtattccccgttctcgaagtcctgtggtcgtggacagcggattgctctgcactctgccttcttgacagtttttcgatcttgagtctgcagggtgctccaggaccccgtggatctgcaggtacgtgtctgcacagggtacgggtagaagccagaaggacacacgtattccagtgcctggccctcttggagaagtcggaaggagccacctttgatctctaccccctccagagagcaggatccttgaggctgggccgaagacaatggagtggtggtcacacctgcagataagaggcccaagatgaagggcatcaggtagagctgggggctgagactgctccccat

SEQ ID NO: 34 - DNA, 4989 bp, Macaca fascicularis
  source 1..4989: mol_type = genomic DNA
gttggggcacccaaagacaaccatgttctcagtgaaggtgccgaggtcctggcattgtttctggttctcttcatcttggcattcgtcctcctcgggccagtgctccacccaggtgtccttcccgatgatgtagctgagattgggtttctctccccagaaatcggaggagagaccccacatgaggtagtgtttcctctcctccagcttcagggcttccctgcacttgatggggctgatgaacgtgcgctgttgtccaacctgcacctcatccgagcctgacttgatgatctgctcaatggccatgatgtactcgtcaaagtcattggacagctgggccttgaccagtcgggtcttgtacacatagtccactcctggctcacaggccttgtccagccgttcttccagggtgactttgtcatccaacttttgtatgaagcaattctcctcagcacagcggcacagctcatcacgacagagcttgttcagctttccatcctccttttccgggtggtagaaccgggtacagctttccgccaggttgtaataggcgtagaccttgactgcaccaggctggataagctctacattaaaatattggtgaactttgaaagctatacagtcatcctcagagtgtgagaccttgtccaggtagatgatgagggtgttcctatcggagaaggctttgtccagctcatacttggagatgtatctgtcaacgccgtttgccagctgcttgaggtcatctgtgtctggaacgaagccagtcatcatggatatgtccagtatagacatagtggcatcctggtctccccggtacctggtacagatctcaaggatcatagtgttcttggcatcctgaggcctcttttctgtttccggtgctggttttatggtgaccttgaggtcgaatttattacaggtgagttgacctttggccttagcatggtacattgtcactaccgacaaggtgccttggccttttccttcagctgtgactgtgaaaccctcattttccttggtctcttctgatcgcaggaggctggcagattcccagtggatacggtggatgatcttggagctgcgactgggcagttggagggacacatccaggttcagttccttgtgatcagggacatccttttggtattgagccaaggcttggaacaccatgaaggtggcctgggtagagccatagccaccaccgtagtatctctgttcattgagccaacgcacgacgggaggcacaaagtcaaagtcttttagctgcagtagggccaagagggcataggatgtggcctccacattgtagagctgctgaccaggctcctcccagcggttcttatctttggctgtggtcagaaatttgttgagaagaggtcccttcagcctgcccatctgggccagggcataggcagcgatggccacagtgtaggatctctgtaggttcatgtagttggcttcaaggaagtctcctgctttagtgatgctgcctggcaggctgttgacctgctcctcgcaaatctctttagcctcttgcagcgagatgagaacaaaggccgtgagggccatgtctttctcgttggtgttccggaatccaccagtcatttcttgatgtatcacgggcgcatcctcctggaagaccccgtcgggcttctgcttctccaggatcagccatttaacagccccgcagaggacctgggagtcgatggcaatgaggttgacagccagagagaagaccttgaccacgtaggcggtcagccaggtgctgggtgcccggttcaggaaggccgcaaaggcagagctgggttgtctgaaggccagctgctgggtgtaccccttcttgatgagctccaaggccccctgccgcttctccgggccgaacttctcccactgttccgtttcatccaggtaatgcacagcgatgactgtgggcgtcatggtgatcatgttctgttctccgcagcccgagggggtcacgatgaggtgcttcagccgttccgcatcgatggcatcctctgtcatctgggccaccggggtcccttgcaggagaattctggtctcagactcggtgtccgggacttggtcactgaggtctgcaggtgggacgtcctctctctgcactccttcctggcccaggcgttctggatccagcgtgcgaacagccacagttttgttcattctgattccttccggcacgaccttcagggacttcctgacaccgtcactgatgaaaaaatggtagacggcagccttgacttccacttcctgctggccggtctttaggggcacgatgacataaggaacggacagcgaggacttgggggggatggttacggtctgctggtgacgcctcttggcggtggccaggctgcagaaggctggattgtggagtagttccaccctcaccttgagctcttggttctgccggtaattgtagagaacagctcggatttccacctgctcgtttcgaacaacagagtagggtagccgcaggtcgatgaagaagtcctgcattactgtgacctcgaaggggtctgccacacagatccctttcttgtctgacaagctcacggccagaatctcccacgtggtgatggagtctttcaaaaatatattcatgagcttcgtggagattccgtttttcggtgcctctttcaactcttcaatcttccacagccaactctctgggaactcacttcgggaaacgatgttctcttctgcgatgatgtcctcatccaggttactcctggccaggcccaggtgactggcccgcgcgtgctgccgccgcagctcagtgatgtagttgcagcagtccaggaaggccttcttgcacgcctcgtccagggtgatgtaacgggtccggcgctggcatgagaacctcatggggttctcccgcataccgtgctcgcagcacttgcgcagctccttggggtactgaccaactttgtccattctcttctccgcgagctgcacggaacggcgtcggcgggcggctggctgtgggcactgaagttctgccctctgggccgtctgctggccactgctgctcgcaaaggtcaggcctgcatccgagaagacaccagcgtaatccttcccactgcctggggtgcagccgatgtctgccttctccaccacgtcccagatcttactctgcgtcagcttgttcttcttattcagcacaaacacgcccttgtccacagccaccagtcccacccgggccccgtggtcaccctctatcttcagggtcatctgctgcccgggtaaaggctgcctgtcttctgactggccgctttttaccaccagcgagcccacgcaagagtccttgacgtccacccacacggagtcggccaccacttccctctggccgttggcgccgatcagcgtgtagtaggccaccaggcggaaggaagggatgaagtcggtggtgatggacaggggcagcaccaccaggtcctggccaggctctcgcacctggcgtcccaccttcaacagcttgcctttgttcataatcaggtaggtgtagtagcggatcttggcctcctgggtgcggtccattcgcaggaggaagttgacgttgagggtctccccaggtctgagctctgcacgtggcactgagagatgcaggtaattgttggagttgcccacggtgctgtagggctgagcctccatggtcctggtagcctgctccgcctccgagagctcccgcttcttcgtgcgcaccgtgatgctcaagggcttctggctggggtgtgtgttgatgctgagtttggccacgccgtctccctgggttagagactgcacagcgtcctcgccctggactgccacggggactcggtaggctggagagccatcggggttcgtcacgaacaccatgaggtcaaagggcattcctggtttgaagtacttgggcgtcttggtgaagtggatctggtagggagaggtcacgatggggatcccgctgcgctccgcctgcaccatgtcactgcctgagtgcaggataacggtgacagacacgtacaaggacttccccaccaggtcttccggtcggggattctgcaccccgtccagcagtaccttccggctcagcacggcgtctcctgagccatcctcaatctggatgcgcttgagggattcaggcagggaaatcctctgctcgccatcctggatcccgaagatgacaaaggcagttccctccactttctttccatagaggaacctggcggtgatggtgacctccaggcccttctggttatagatgtagtagaatttctctgtaggctccactatgacctcgaaactgggcagcacgtactccttcacctcaaactcagtggagaagacctgttgcggcgaattttcatagtaggctcggatcttccactggcccatgttgacgagttccggaatgtcccaagacaagggcaagatgccaaattggttctgagaagacaaggagtcctgcttgaccgggatgccgtccgggttctcaatgttgaccacgaccgtccggcccacgggtagcagcttgtggttgacggtgaagatccgacagagaactgtggagccaggggtgtagatggtcttgtctgtctggatgaagaggtacccgctctgaaggctgaccagtaccaccttctccaccacttgggccccgaaggtggcctgcacagtcacgaacttgttgtgccccttttctgacttgaactccttgttggctgggatcctgatggtgacgctgcccatgtggctggtggcaggggtcagtacggtcttctcactggacagcaccagttttttgcctgggaagtcgtggacagtgacagtgaccggaacatccccattcgcgtcgtgggcctccagcaccacggtctcctcactctccagccgcaagacgttgggggtgatcatagagtacatgggagtccccagagccagggggaggtggattagtagcaggagcagcaggctgggacctgaggtgagtcccat

SEQ ID NO: 35 - DNA, 2955 bp, Macaca fascicularis
  source 1..2955: mol_type = genomic DNA
ggtaatttagttactgttatctcccagcaatcaaatgcattcttgagaatttctcccaagtgagaaaaagtaacataatttatttataaatgtgtgaaatgtgtattaatagtaacaataaagttaacatgacacatgctgatgtctaagcatttattaaatttgattttgcatttttttattttgatatgtttttcctcatttctttctttctttccttttttttaaagagttttcagaccttttcaaaaggtctcagaccctaagtatcatgttctctaatggataagattgtacagccaatgttaatcagcttctcaggtaggtaacgttaccttatacaactcataagcctaggtattaagttagactatataaaattgatgtttttctcttgtaaaataagatcaaatagaggcaatttcacataatttaagctaatagtttatagtcactctattgtgttgctgaacactgtatatattattcctttcatctaactggagttttgtattaatcatctcctctttatctcccttccccactacccttccagcctttggtaaactagtagtttttggttacaaatataacacattttcccccttggacacatagatttaaatggtagagttaagactaataaaagcaactgctgtgcaggtggctggtgttcagtatttgctgaatgaatgtatgcacacctaagcaaataaccaaaccaaacataacaatgtaaataagagttaaattgcatggtacagacgtgtggtcatagacttggcagaatatgttaaccgtacaaagcagtttgacaattactttgaagtttttaaaccaacattctgttttaatttaattttgtttttttaagaagagattggcattgtctgtgggagaaagcagttctggcatatttcactcttgactcctcattagggaataaaaaatggaaacatcataggagtttaagaaagaaaaattaaaaaataattatagacctaagagaggagacttcagaagttggtaggattttcatgaagcatgttgctatttctttggcagctaagattatcttcagggataggatctgaaggtcctagtgttcttttcttccactggagctcagagaagccaacagttctatttttcacgggggaagtctagggctggcaatccttcagaaactttttgtttactgatttcacaggcaattccctcaaatttgaatgggcaggtacacaaacactttccatccattagaattgctgtacctccattttggcatgagtggcattttcttacactaaattcattgatatagtcttcaatggctctttccaagttttgtttctttaggtgtgcatttttcattttcactggaaccagattatatataggagacagtttttgactaatgagaacaggagcatcatttatggaagaggcccagttgacaaaatcagtcacatcaatcatggttcctcggagaagcttttctttcagttcaaatgcatattgtctggttccacctcttatgagtgaaataacatcatctatgaggtgatcactggtgatgtttacagctctaccctctcccctctttacacaatcatctttatcagctttagctccagcagagattttagagaaatccagagatacatccagatgatacccgaggcatctctttacatcttttagttcaacacctttccggttcatggaagctttatccaaaacatatattagttcatagagtcctcccagagacccagagctactgtagtgggttccataggtttccaaaaaggcaaaatattctcccttttcataggtagttggcaaagcttttatatcatccacaaaagttgttgtgagcacaacatcacgatttctcatcataaatcttcccagatgaatttctcctttcacatgcaggaacattttttccttctttgaagaatatgacaaaaatagttggtaagtttcatttttggaatatgaaaaccgaaaactaccctggccacgtaaagaatttgaggaggcttgtttctcagaagacttttcagttttaactttatttgcttcagtgggtgtaaattttagagatatatctgcattaaaatttgatgtcttctcttggacgatacttttaaatgcttcaatttgttcttcataatgttcggttcttaaatttttctcgcctttggtttcatagatcaaagaagccacgttccagggtcttcggtagtatgtcaaagtgtttccatcccgatcccggttacagagtccattgtagaactcattgtcaaaaggtgtgcttaggggatccatccctaaaatgttgatcccgtagcctgctgttcgtgccagctcagactcttctaccactctgtctctgcaggggggacggggatcactttcacaatcatcctcatctgaaaagtctccacagtcattgtcaccattacacaggagtcgcctctttatgcatctgcctgtaccgcattgaaagtcatttccgcagtcatcctcagcatcctcacagggctctgtgggcacacactgtcgtctgtctcccacagcatcggtgcaacttttcccattaaattgtccgaagacctcaatgcttcttgaacgaaacatttgtctgaggcaaggatcgcattgtgaccattcactccaggggctcattctgcagtctatgtgcgatgcggaaccacggctttctgttggctgtgggtcataactgggcgtgtactctgctgtgaggacgcttatttctaaaatgcagattgcagctgcaaagctccagcaggctgacatgctgctcttgctgggtggctgcgagtggggtggcagagcaggtcgggtaaggcatttatttgcaaagggccagaggacagggaacaagtattgtttgtctgcattcagggtttttgtcaatttggg

SEQ ID NO: 36 - DNA, 2727 bp, Macaca fascicularis
  source 1..2727: mol_type = genomic DNA
tgttgtcgcagctgttttaattcaatcccgcgcccctgtccagcaggaaaccccttagagaaaacccaaatcctcatcttggagtttctccttcagccagggcagcacttggaagaggttgacgtgaaagtctcgggcgtgagcaggtacctgcttttgccgcttctggtttttgcagacatccactactccccagctgatgacaccaacttgaatgaaacgacttctcttgtgaactatcaaggggccgccagaatcacctctgcaagtattggggtcagcatagggactcactcctccagtacaaaggaaccgaggggtgaccacctccgagatgtccttgactttgtcatagcctggggcatattgagcatctctctcacagctgcctttcttatccccattcttgatgtagacctccttccgagtcagcttcttctcctcctcagacacaaacagagctttgatatcctgtgcagggagcagctcttccttctgttgctggcaagtggtagttggaggaagcctcaaagctcgagttgttccctcggtacaggggagacaaatgggcctgatagtcgggtcataattcaactttttcttgagcttgatcagggcaacgtcatagtcataaaattcaggaattcctgcttcttttttcccgctaatgttgtagtcggggtgaaataggactttttctatctccaggtcccgcttcttccccacgctgaccttgatcgagtgttccttgtcgtccacagtaaaacaatgtgctgctgtcagcacaaagtactcagacaccacagcccccatacagctctcatgtcccttcgaagggcgagtgactgagatcttggcctgccatggttgcttgtggtaatcggtacccgtcgtgtgttcccaaaccatgccacagagactcagagactggctttcatcaatcatttggaagaaaacgtcttccaggttttccatatccttgactttgaacacatgttgctcattgtctttcttggaagccaaagcattgatgttcacttggtccaccaaaggtccaaccccaaacacatagacatccagataatcctccctcgggtttttgcgatccttgccgatgtataacaagtcccggatctcatcaatgacagtaattgggtccccgcccatgttgtgcaatccatcggtcatgaggatgatgacatggcgggtgcggttccagccttcaggagggatgtcctctggccaactcatcatgctgtacactgcctggagggccctcttggtgttagtccctgacttcaacttgtggtcttcataattgatttcactgagcttcttcgtgacccagtctgcattgctgctctcttggtcagacactttgacccaaattctggggtatgtggcatatgtcactagagcatatcttggcttcacaccataacttgccaccttctcaattaagttgactagacactttttggctcctgtgaagttgccggccccaatgctgtctgatccatctagcaccaggtagatgttcatggagcctgaagggtctaggatgatcctccgcttctgttgttcccctgggctgtgcccatcctcggcatcgactccttctatggtctccgtcagggaagacaggaaagcttcggccacctcttgaggggtgtcgtacatgaaggagtcttggcaggaaggctccgtcccgctccaagagccaccttcctgacacgttcgccgctgggagccacgcagggtaagcccccggctgcagtggtaggtgacgctgtcttcaaggcggtaccggctgcccaccttccttgtgccaatggggatgcctgggttggagcagtaccccgctccgttgtcacagatcgctgtctgcccactccaccggccattcacttggcaggtgcgattggcagagccccggagagtgtaaccgtcatagcagtggaaagagatctcatcactcacattgtagtagggagaccggggccggtattccccgttctcgaagtcctgtggtcgtggacagcggattgctctgcactctgccttcttgacagtttttcgatcttgagtctgcagggtgctccaggaccccgtggatctgcaggtacgtgtctgcacagggtacgggtagaagccagaaggacacacgtattccagtgcctggccctcttggagaagtcggaaggagccacctttgatctctaccccctccagagagcaggatccttgaggctgggccgaagacaatggagtggtggtcacacctgcagataagaggcccaagatgaagggcatcaggtagagctgggggctgagactgctccccatggcgttagaaggcaggagagaagctgggcctggggcaggatggcgtgtcctggcttgttttgcttgtctacttagctcagtgtccaagctgaaactccagacctagacctggtcacattcccttcccctgccccccaccagctcccggccttttatgcaatctgtgttctggcacctgcagcttgccccgcctgtcctaccctcatcactttcccggaacatccaagcgggagggccccgctgagctgccagtcaaggaagcagaaactgcagaagtcccaccctttgctgcccaaggtccaggactctccccttcagtacctccttctggcctcagctcctccccaacaagcccagaccacccacttagggaccagaaat

SEQ ID NO: 37 - DNA, 5106 bp, Macaca fascicularis
  source 1..5106: mol_type = genomic DNA
tgaaatataactgaagctttattgggagtgggggaatgggggtgtggtcagttggggcacccaaagacaaccatgttctcagtgaaggtgccgaggtcctggcattgtttctggttctcttcatcttggcattcgtcctcctcgggccagtgctccacccaggtgtccttcccgatgatgtagctgagattgggtttctctccccagaaatcggaggagagaccccacatgaggtagtgtttcctctcctccagcttcagggcttccctgcacttgatggggctgatgaacgtgcgctgttgtccaacctgcacctcatccgagcctgacttgatgatctgctcaatggccatgatgtactcgtcaaagtcattggacagctgggccttgaccagtcgggtcttgtacacatagtccactcctggctcacaggccttgtccagccgttcttccagggtgactttgtcatccaacttttgtatgaagcaattctcctcagcacagcggcacagctcatcacgacagagcttgttcagctttccatcctccttttctgggtggtagaaccgggtacagctttccgccaggttgtaataggcgtagaccttgactgcaccaggctggataagctctacattaaaatattggtgaactttgaaagctatacagtcatcctcagagtgtgagaccttgtccaggtagatgatgagggtgttcctatcggagaaggctttgtccagctcatacttggagatgtatctgtcaacgccgtttgccagctgcttgaggtcatctgtgtctggaacgaagccagtcatcatggatatgtccagtatagacatagtggcatcctggtctccccggtacctggtacagatctcaaggatcatagtgttcttggcatcctgaggcctcttttctgtttccggtgctggttttatggtgaccttgaggtcgaatttattacaggtgagttgacctttggccttagcatggtacattgtcactaccgacaaggtgccttggccttttccttcagctgtgactgtgaaaccctcattttccttggtctcttctgatcgcaggaggctggcagattcccagtggatacggtggatgatcttggagctgcgactgggcagttggagggacacatccaggttcagttccttgtgatcagggacatccttttggtattgagccaaggcttggaacaccatgaaggtggcctgggtagagccatagccaccaccgtagtatctctgttcattgagccaacgcacgacgggaggcacaaagtcaaagtcttttagctgcagtagggccaagagggcataggatgtggcctccacattgtagagctgctgaccaggctcctcccagcggttcttatctttggctgtggtcagaaatttgttgagaagaggtcccttcagcctgcccatctgggccagggcataggcagcgatggccacagtgtaggatctctgtaggttcatgtagttggcttcaaggaagtctcctgctttagtgatgctgccgggcaggctgttgacctgctcctcgcaaatctctttagcctcttgcagcgagatgagaacaaaggccgtgagggccatgtctttctcgttggtgttccggaatccaccagtcatttcttgatgtatcacgggcgcatcctcctggaagaccccgtcgggcttctgcttctccaggatcagccatttaacagccccgcagaggacctgggagtcgatggcaatgaggttgacagccagagagaagaccttgaccacgtaggcggtcagccaggtgctgggtgcccggttcaggaaggccgcaaaggcagagctgggttgtctgaaggccagctgctgggtgtaccccttcttgatgagctccaaggccccctgccgcttctccgggccgaacttctcccactgttccgtttcatccaggtaatgcacagcgatgactgtgggcgtcatggtgatcatgttctgttctccgcagcccgagggggtcacgatgaggtgcttcagccgttccgcatcgatggcatcctctgtcatctgggccaccggggtcccttgcaggagaattctggtctcagactcggtgtccgggacttggtcactgaggtctgcaggtgggacgtcctctctctgcactccttcctggcccaggcgttctggatccagcgtgcgaacagccacagttttgttcattctgattccttccggcacgaccttcagggacttcctgacaccgtcactgatgaaaaaatggtagacggcagccttgacttccacttcctgctggccggtctttaggggcacgatgacataaggaacggacagcgaggacttgggggggatggttacggtctgctggtgacgcctcttggcggtggccaggctgcagaaggctggattgtggagtagttccaccctcaccttgagctcttggttctgccggtaattgtagagaacagctcggatttccacctgctcgtttcgaacaacagagtagggtagccgcaggtcgatgaagaagtcctgcattactgtgacctcgaaggggtctgccacacagatccctttcttgtctgacaagctcacggccagaatctcccacgtggtgatggagtctttcaaaaatatattcatgagcttcgtggagattccgtttttcggtgcctctttcaactcttcaatcttccacagccaactctctgggaactcacttcgggaaacgatgttctcttctgcgatgatgtcctcatccaggttactcctggccaggcccaggtgactggcccgcgcgtgctgccgccgcagctcggtgatgtagttgcagcagtccaggaaggccttcttgcacgcctcgtccagggtgatgtaacgggtccggcgctggcatgagaacctcatggggttctcccgcataccgtgctcgcagcacttgcgcagctccttggggtactgaccaactttgtccattctcttctccgcgagctgcacggaacggcgtcggcgggcggctggctgtgggcactgaagttctgccctctgggccgtctgctggccactgctgctcgcaaaggtcaggcctgcatccgagaagacaccagcgtaatccttcccactgcctggggtgcagccgatgtctgccttctccaccacgtcccagatcttactctgcgtcagcttgttcttcttattcagcacaaacacgcccttgtccacagccaccagtcccacccgggccccgtggtcaccctctatcttcagggtcatctgctgcccgggtaaaggctgcctgtcttctgactggccgctttttaccaccagcgagcccacgcaagagtccttgacgtccacccacacggagtcggccaccacttccctctggccgttggcgccgatcagcgtgtagtaggccaccaggcggaaggaagggatgaagtcggtggtgatggacaggggcagcaccaccaggtcctggccaggctctcgcacctggcgtcccaccttcaacagcttgcctttgttcataatcaggtaggtgtagtagcggatcttggcctcctgggtgcggtccattcgcaggaggaagttgacgttgagggtctccccaggtctgagctctgcacgtggcactgagagatgcaggtaattgttggagttgcccacggtgctgtagggctgagcctccatggtcctggtagcctgctccgcctccgagagctcccgcttcttcgtgcgcaccgtgatgctcaagggcttctggctggggtgtgtgttgatgctgagtttggccacgccgtctccctgggttagagactgcacagcgtcctcgccctggactgccacggggactcggtaggctggagagccatcggggttcgtcacgaacaccatgaggtcaaagggcattcctggtttgaagtacttgggcgtcttggtgaagtggatctggtagggagaggtcacgatggggatcccgctgcgctccgcctgcaccatgtcactgcctgagtgcaggataacggtgacagacacatacaaggacttccccactaggtcttccggtcggggattctgcaccccgtccagcagtaccttccggctcagcacggcgtctcctgagccatcctcaatctggatgcgcttgagggattcaggcagggaaatcctctgctcgccatcctggatcccgaagatgacaaaggcagttccctccactttctttccatagaggaacctggcggtgatggtgacctccaggcccttctggttatagatgtagtagaatttctctgtaggctccactatgacctcgaaactgggcagcacgtactccttcacctcaaactcagtggagaagacctgttgcggcgaattttcatagtaggctcggatcttccactggcccatgttgacgagttccggaatgtcccaagacaagggcaagatgccaaattggttctgagaagacaaggagtcctgcttgaccgggatgccgtccgggttctcaatgttgaccacgaccgtccggcccacgggtagcagcttgtggttgacggtgaagatccgacagagaactgtggagccaggggtgtagatggtcttgtctgtctggatgaagaggtacccgctctgaaggctgaccagtaccaccttctccaccacttgggccccgaaggtggcctgcacagtcacgaacttgttgtgccccttttctgacttgaactccttgttggctgggatcctgatggtgacgctgcccatgtggctggtggcaggggtcagcacggtcttctcactggacagcaccagttttttgcctgggaagtcgtggacagtgacagtgaccggaacatccccattcgcgtcatgggcctccagcaccacggtctcctcactctccagccgcaagacgtttggggtgatcatagagtacatgggagtccccagagccagggggaggtggattagtagcaggagcagcaggctgggacctgaggtgagtcccatggtgctgggacagtgcagggtcagagggacagagggacagagggagaggatggggaggagtgagcag

SEQ ID NO: 38 - DNA, 2091 bp, Macaca fascicularis
  source 1..2091: mol_type = genomic DNA
tttgaagtttttaaaccaacattctgttttaatttaattttgttttttttagaagagattggcattgtctgtgggagaaagcagttctggcatatttcactcttgactcctcattagggaataaaaaatggaaacatcataggagtttaagaaagaaaaattaaaaaataattatagacctaagagaggagacttcagaagttggtaggattttcatgaagcatgttgctatttctttggcagctaagattatcttcagggataggatctgaaggtcctagtgttcttttcttccactggagctcagagaagccaacagttctatttttcacgggggaagtctagggctggcaatccttcagaaactttttgtttactgatttcacaggcaattccctcaaatttgaatgggcaggtacacaaacactttccatccattagaattgctgtacctccattttggcatgagtggcattttcttacactaaattcattgatatagtcttcaatggctctttccaagttttgtttctttaggtgtgcatttttcattttcactggaaccagattatatataggagacagtttttgactaatgagaacaggagcatcatttatggaagaggcccagttgacaaaatcagtcacatcaatcatggttcctcggagaagcttttctttcagttcaaatgcatattgtctggttccacctcttatgagtgaaataacatcatctatgaggtgatcactggtgatgtttacagctctaccctctcccctctttacacaatcatctttatcagctttagctccagcagagattttagagaaatccagagatacatccagatgatacccgaggcatctctttacatcttttagttcaacacctttccggttcatggaagctttatccaaaacatatattagttcatagagtcctcccagagacccagagctactgtagtgggttccataggtttccaaaaaggcaaaatattctcccttttcataggtagttggcaaagcttttatatcatccacaaaagttgttgtgagcacaacatcacgatttctcatcataaatcttcccagatgaatttctcctttcacatgcaggaacattttttccttctttgaagaatatgacaaaaatagttggtaagtttcatttttggaatatgaaaaccgaaaactaccctggccacgtaaagaatttgaagaggcttgtttctcagaagacttttcagttttaactttatttgcttcagtgggtgtaaattttagagatatatctgcattaaaatttgatgtcttctcttggacgatacttttaaatgcttcaatttgttcttcataatgttcggttcttaaatttttctcgcctttggtttcatagatcaaagaagccacgttccagggtcttcggtagtatgtcaaagtgtttccatcccgatcccggttacagagtccattgtagaactcattgtcaaaaggtgtgcttaggggatccatccctaaaatgttgatcccgtagcctgctgttcgtgccagctcagactcttctaccactctgtctctgcaggggggacggggatcaccttcacaatcatcctcatctgaaaagtctccacagtcattgtcaccattacacaggagtcgcctctttatgcatctgcctgtaccgcattgaaagtcatttccgcagtcatcctcagcatcctcacagggctctgtgggcacacactgtcgtctgtctcccacagcatcggtgcaacttttcccattaaattgtccgaagacctcaatgcttcttgaacgaaacatttgtctgaggcaaggatcgcattgtgaccattcactccaggggctcattctgcagtctatgtgcgatgcggaaccacggctttctgttggctgtgggtcataactgggcgtgtactctgctgtgaggatgcttatttctaaaatgcagattgcagctgcaaagctccagcaggctgacatgctgctcttgctgggtggctgcgagtggggtggcagagcaggtcgggtaaggcatttatttgcaaagggccagaggacagggaa

SEQ ID NO: 39 - DNA, 21 bp, synthetic construct
  source 1..21: mol_type = other DNA
  modified_base 1: mod_base = OTHER; note = 2'-O-methylcytidine-3'-phosphate
  modified_base 2: mod_base = OTHER; note = 2'-O-methyluridine-3'-phosphate
  modified_base 3: mod_base = OTHER; note = 2'-O-methyluridine-3'-phosphate
  modified_base 4: mod_base = OTHER; note = adenosine-3'-phosphate
  modified_base 5: mod_base = OTHER; note = 2'-O-methylcytidine-3'-phosphate
  modified_base 6: mod_base = OTHER; note = guanosine-3'-phosphate
  modified_base 7: mod_base = OTHER; note = 2'-O-methylcytidine-3'-phosphate
  modified_base 8: mod_base = OTHER; note = 2'-O-methyluridine-3'-phosphate
  modified_base 9: mod_base = OTHER; note = guanosine-3'-phosphate
  modified_base 10: mod_base = OTHER; note = adenosine-3'-phosphate
  modified_base 11: mod_base = OTHER; note = guanosine-3'-phosphate
  modified_base 12: mod_base = OTHER; note = 2'-O-methyluridine-3'-phosphate
  modified_base 13: mod_base = OTHER; note = adenosine-3'-phosphate
  modified_base 14: mod_base = OTHER; note = 2'-O-methylcytidine-3'-phosphate
  modified_base 15: mod_base = OTHER; note = 2'-O-methyluridine-3'-phosphate
  modified_base 16: mod_base = OTHER; note = 2'-O-methyluridine-3'-phosphate
  modified_base 17: mod_base = OTHER; note = 2'-O-methylcytidine-3'-phosphate
  modified_base 18: mod_base = OTHER; note = guanosine-3'-phosphate
  modified_base 19: mod_base = OTHER; note = adenosine-3'-phosphate
  modified_base 20: mod_base = OTHER; note = 2'-deoxythymidine-3'-phosphorothioate
  misc_feature 1..19: note = RNA
  misc_feature 20..21: note = DNA
cttacgctgagtacttcgatt

SEQ ID NO: 40 - DNA, 21 bp, synthetic construct
  source 1..21: mol_type = other DNA
  modified_base 1: mod_base = OTHER; note = uridine-3'-phosphate
  modified_base 2: mod_base = OTHER; note = cytidine-3'-phosphate
  modified_base 3: mod_base = OTHER; note = guanosine-3'-phosphate
  modified_base 4: mod_base = OTHER; note = adenosine-3'-phosphate
  modified_base 5: mod_base = OTHER; note = adenosine-3'-phosphate
  modified_base 6: mod_base = OTHER; note = guanosine-3'-phosphate
  modified_base 7: mod_base = OTHER; note = 2'-O-methyluridine-3'-phosphate
  modified_base 8: mod_base = OTHER; note = adenosine-3'-phosphate
  modified_base 9: mod_base = OTHER; note = cytidine-3'-phosphate
  modified_base 10: mod_base = OTHER; note = uridine-3'-phosphate
  modified_base 11: mod_base = OTHER; note = 2'-O-methylcytidine-3'-phosphate
  modified_base 12: mod_base = OTHER; note = adenosine-3'-phosphate
  modified_base 13: mod_base = OTHER; note = guanosine-3'-phosphate
  modified_base 14: mod_base = OTHER; note = cytidine-3'-phosphate
  modified_base 15: mod_base = OTHER; note = guanosine-3'-phosphate
  modified_base 16: mod_base = OTHER; note = 2'-O-methyluridine-3'-phosphate
  modified_base 17: mod_base = OTHER; note = adenosine-3'-phosphate
  modified_base 18: mod_base = OTHER; note = adenosine-3'-phosphate
  modified_base 19: mod_base = OTHER; note = guanosine-3'-phosphate
  modified_base 20: mod_base = OTHER; note = 2'-deoxythymidine-3'-phosphorothioate
  misc_feature 1..19: note = RNA
  misc_feature 20..21: note = DNA
tcgaagtactcagcgtaagtt

SEQ ID NO: 41 - RNA, 21 nt, synthetic construct
  source 1..21: mol_type = other RNA
attcctgaattttatgactat

SEQ ID NO: 42 - RNA, 21 nt, synthetic construct
  source 1..21: mol_type = other RNA
cctgatcaagctcaagaataa

SEQ ID NO: 43 - RNA, 21 nt, synthetic construct
  source 1..21: mol_type = other RNA
gaagcaggaattcctgaattt

SEQ ID NO: 44 - RNA, 21 nt, synthetic construct
  source 1..21: mol_type = other RNA
agcaacatgtgttcaaagtca

SEQ ID NO: 45 - RNA, 21 nt, synthetic construct
  source 1..21: mol_type = other RNA
gctgtggtgtctgagtacttt

SEQ ID NO: 46 - RNA, 21 nt, synthetic construct
  source 1..21: mol_type = other RNA
aagtgtctagtcaacttaatt

SEQ ID NO: 47 - RNA, 21 nt, synthetic construct
  source 1..21: mol_type = other RNA
agctgtgagagagatgctcaa

SEQ ID NO: 48 - RNA, 21 nt, synthetic construct
  source 1..21: mol_type = other RNA
agccaaaaagtgtctagtcaa

SEQ ID NO: 49 - RNA, 21 nt, synthetic construct
  source 1..21: mol_type = other RNA
tgtgagtgatgagatctcttt

SEQ ID NO: 50 - RNA, 21 nt, synthetic construct
  source 1..21: mol_type = other RNA
aattgagaaggtggcaagtta

SEQ ID NO: 51 - RNA, 21 nt, synthetic construct
  source 1..21: mol_type = other RNA
caacatgtgttcaaagtcaag

SEQ ID NO: 52 - RNA, 21 nt, synthetic construct
  source 1..21: mol_type = other RNA
tgtgagagagatgctcaatat

SEQ ID NO: 53 - RNA, 21 nt, synthetic construct
  source 1..21: mol_type = other RNA
gtctagtcaacttaattgaga

SEQ ID NO: 54 - RNA, 21 nt, synthetic construct
  source 1..21: mol_type = other RNA
tccaagaaagacaatgagcaa

SEQ ID NO: 55 - RNA, 21 nt, synthetic construct
  source 1..21: mol_type = other RNA
tgtgttcaaagtcaaggatat

SEQ ID NO: 56 - RNA, 21 nt, synthetic construct
  source 1..21: mol_type = other RNA
attgatgagatccgggacttg

SEQ ID NO: 57 - RNA, 21 nt, synthetic construct
  source 1..21: mol_type = other RNA
ctgtgagagagatgctcaata

SEQ ID NO: 58 - RNA, 21 nt, synthetic construct
  source 1..21: mol_type = other RNA
gagccaaaaagtgtctagtca

SEQ ID NO: 59 - RNA, 21 nt, synthetic construct
  source 1..21: mol_type = other RNA
tccaagatgaggatttgggtt

SEQ ID NO: 60 - RNA, 21 nt, synthetic construct
  source 1..21: mol_type = other RNA
cccttgatagttcacaagaga

SEQ ID NO: 61 - RNA, 21 nt, synthetic construct
  source 1..21: mol_type = other RNA
caaagtcaaggatatggaaaa

SEQ ID NO: 62 - RNA, 21 nt, synthetic construct
  source 1..21: mol_type = other RNA
tagttcacaagagaagtcgtt

SEQ ID NO: 63 - RNA, 21 nt, synthetic construct
  source 1..21: mol_type = other RNA
ggccccttgatagttcacaag

SEQ ID NO: 64 - RNA, 21 nt, synthetic construct
  source 1..21: mol_type = other RNA
tggtgctagatggatcagaca

SEQ ID NO: 65 - RNA, 21 nt, synthetic construct
  source 1..21: mol_type = other RNA
gctagatggatcagacagcat

SEQ ID NO: 66 - RNA, 21 nt, synthetic construct
  source 1..21: mol_type = other RNA
tacctggtgctagatggatca

SEQ ID NO: 67 - RNA, 21 nt, synthetic construct
  source 1..21: mol_type = other RNA
ggtgctagatggatcagacaa

SEQ ID NO: 68 - RNA, 21 nt, synthetic construct
  source 1..21: mol_type = other RNA
tctgagtctctgtggcatggt

SEQ ID NO: 69 - RNA, 21 nt, synthetic construct
  source 1..21: mol_type = other RNA
gtgctagatggatcagacaga

SEQ ID NO: 70 - RNA, 21 nt, synthetic construct
  source 1..21: mol_type = other RNA
ctacctggtgctagatggata

SEQ ID NO: 71 - RNA, 21 nt, synthetic construct
  source 1..21: mol_type = other RNA
acctggtgctagatggatcaa

SEQ ID NO: 72 - RNA, 23 nt, synthetic construct
  source 1..23: mol_type = other RNA
atagtcataaaattcaggaattc

SEQ ID NO: 73 - RNA, 23 nt, synthetic construct
  source 1..23: mol_type = other RNA
ttattcttgagcttgatcagggc

SEQ ID NO: 74 - RNA, 23 nt, synthetic construct
  source 1..23: mol_type = other RNA
aaattcaggaattcctgcttctt

SEQ ID NO: 75 - RNA, 23 nt, synthetic construct
  source 1..23: mol_type = other RNA
tgactttgaacacatgttgctca

SEQ ID NO: 76 - RNA, 23 nt, synthetic construct
  source 1..23: mol_type = other RNA
aaagtactcagacaccacagccc

SEQ ID NO: 77 - RNA, 23 nt, synthetic construct
  source 1..23: mol_type = other RNA
aattaagttgactagacactttt

SEQ ID NO: 78 - RNA, 23 nt, synthetic construct
  source 1..23: mol_type = other RNA
ttgagcatctctctcacagctgc

SEQ ID NO: 79 - RNA, 23 nt, synthetic construct
  source 1..23: mol_type = other RNA
ttgactagacactttttggctcc

SEQ ID NO: 80 - RNA, 23 nt, synthetic construct
  source 1..23: mol_type = other RNA
aaagagatctcatcactcacatt

SEQ ID NO: 81 - RNA, 23 nt, synthetic construct
  source 1..23: mol_type = other RNA
taacttgccaccttctcaattaa

SEQ ID NO: 82 - RNA, 23 nt, synthetic construct
  source 1..23: mol_type = other RNA
cttgactttgaacacatgttgct

SEQ ID NO: 83 - RNA, 23 nt, synthetic construct
  source 1..23: mol_type = other RNA
atattgagcatctctctcacagc

SEQ ID NO: 84 - RNA, 23 nt, synthetic construct
  source 1..23: mol_type = other RNA
tctcaattaagttgactagacac

SEQ ID NO: 85 - RNA, 23 nt, synthetic construct
  source 1..23: mol_type = other RNA
ttgctcattgtctttcttggaag

SEQ ID NO: 86 - RNA, 23 nt, synthetic construct
  source 1..23: mol_type = other RNA
atatccttgactttgaacacatg

SEQ ID NO: 87 - RNA, 23 nt, synthetic construct
  source 1..23: mol_type = other RNA
caagtcccggatctcatcaatga

SEQ ID NO: 88 - RNA, 23 nt, synthetic construct
  source 1..23: mol_type = other RNA
tattgagcatctctctcacagct

SEQ ID NO: 89 - RNA, 23 nt, synthetic construct
  source 1..23: mol_type = other RNA
tgactagacactttttggctcct

SEQ ID NO: 90 - RNA, 23 nt, synthetic construct
  source 1..23: mol_type = other RNA
aacccaaatcctcatcttggagt

SEQ ID NO: 91 - RNA, 23 nt, synthetic construct
  source 1..23: mol_type = other RNA
tctcttgtgaactatcaaggggc

SEQ ID NO: 92 - RNA, 23 nt, synthetic construct
  source 1..23: mol_type = other RNA
ttttccatatccttgactttgaa

SEQ ID NO: 93 - RNA, 23 nt, synthetic construct
  source 1..23: mol_type = other RNA
aacgacttctcttgtgaactatc

SEQ ID NO: 94 - RNA, 23 nt, synthetic construct
  source 1..23: mol_type = other RNA
cttgtgaactatcaaggggccgc

SEQ ID NO: 95 - RNA, 23 nt, synthetic construct
  source 1..23: mol_type = other RNA
tgtctgatccatctagcaccagg

SEQ ID NO: 96 - RNA, 23 nt, synthetic construct
  source 1..23: mol_type = other RNA
atgctgtctgatccatctagcac

SEQ ID NO: 97 - RNA, 23 nt, synthetic construct
  source 1..23: mol_type = other RNA
tgatccatctagcaccaggtaga

SEQ ID NO: 98 - RNA, 23 nt, synthetic construct
  source 1..23: mol_type = other RNA
ttgtctgatccatctagcaccag

SEQ ID NO: 99 - RNA, 23 nt, synthetic construct
  source 1..23: mol_type = other RNA
accatgccacagagactcagaga

SEQ ID NO: 100 - RNA, 23 nt, synthetic construct
  source 1..23: mol_type = other RNA
tctgtctgatccatctagcacca

SEQ ID NO: 101 - RNA, 23 nt, synthetic construct
  source 1..23: mol_type = other RNA
tatccatctagcaccaggtagat

SEQ ID NO: 102 - RNA, 23 nt, synthetic construct
  source 1..23: mol_type = other RNA
ttgatccatctagcaccaggtag

SEQ ID NO: 103 - RNA, 21 nt, synthetic construct
  source 1..21: mol_type = other RNA
gcaagccaagatctcagtcac

SEQ ID NO: 104 - RNA, 21 nt, synthetic construct
  source 1..21: mol_type = other RNA
gattgagaaggtggcgagtta

SEQ ID NO: 105 - RNA, 21 nt, synthetic construct
  source 1..21: mol_type = other RNA
cacaagagaagccgcttcatt

SEQ ID NO: 106 - RNA, 21 nt, synthetic construct
  source 1..21: mol_type = other RNA
ttgtgagagagatgctacaaa

SEQ ID NO: 107 - RNA, 21 nt, synthetic construct
  source 1..21: mol_type = other RNA
tccttcatgaatgttccggga

SEQ ID NO: 108 - RNA, 21 nt, synthetic construct
  source 1..21: mol_type = other RNA
tcacagagaagctcaaccaaa

SEQ ID NO: 109 - RNA, 21 nt, synthetic construct
  source 1..21: mol_type = other RNA
ctcaaccaaatcagttatgaa

SEQ ID NO: 110 - RNA, 21 nt, synthetic construct
  source 1..21: mol_type = other RNA
ccctgacagagaccatcgaag

SEQ ID NO: 111 - RNA, 21 nt, synthetic construct
  source 1..21: mol_type = other RNA
gagcagattgcataaaaggtt

SEQ ID NO: 112 - RNA, 21 nt, synthetic construct
  source 1..21: mol_type = other RNA
cttcatgaatgttccgggaag

SEQ ID NO: 113 - RNA, 21 nt, synthetic construct
  source 1..21: mol_type = other RNA
cttcattcaagttggtgtgat

SEQ ID NO: 114 - RNA, 21 nt, synthetic construct
  source 1..21: mol_type = other RNA
gattgaagaggtcctgttcca

SEQ ID NO: 115 - RNA, 21 nt, synthetic construct
  source 1..21: mol_type = other RNA
atttcttttcaatgctatgat

SEQ ID NO: 116 - RNA, 21 nt, synthetic construct
  source 1..21: mol_type = other RNA
ccagagcagattgcataaaag

SEQ ID NO: 117 - RNA, 21 nt, synthetic construct
  source 1..21: mol_type = other RNA
cacagagaagctcaaccaaat

SEQ ID NO: 118 - RNA, 23 nt, synthetic construct
  source 1..23: mol_type = other RNA
gtgactgagatcttggcttgcca

SEQ ID NO: 119 - RNA, 23 nt, synthetic construct
  source 1..23: mol_type = other RNA
taactcgccaccttctcaatcaa

SEQ ID NO: 120 - RNA, 23 nt, synthetic construct
  source 1..23: mol_type = other RNA
aatgaagcggcttctcttgtgaa

SEQ ID NO: 121 - RNA, 23 nt, synthetic construct
  source 1..23: mol_type = other RNA
tttgtagcatctctctcacaact

SEQ ID NO: 122 - RNA, 23 nt, synthetic construct
  source 1..23: mol_type = other RNA
tcccggaacattcatgaaggagg

SEQ ID NO: 123 - RNA, 23 nt, synthetic construct
  source 1..23: mol_type = other RNA
tttggttgagcttctctgtgacc

SEQ ID NO: 124 - RNA, 23 nt, synthetic construct
  source 1..23: mol_type = other RNA
ttcataactgatttggttgagct

SEQ ID NO: 125 - RNA, 23 nt, synthetic construct
  source 1..23: mol_type = other RNA
cttcgatggtctctgtcagggag

SEQ ID NO: 126 - RNA, 23 nt, synthetic construct
  source 1..23: mol_type = other RNA
aaccttttatgcaatctgctctg

SEQ ID NO: 127 - RNA, 23 nt, synthetic construct
  source 1..23: mol_type = other RNA
cttcccggaacattcatgaagga

SEQ ID NO: 128 - RNA, 23 nt, synthetic construct
  source 1..23: mol_type = other RNA
atcacaccaacttgaatgaagcg

SEQ ID NO: 129 - RNA, 23 nt, synthetic construct
  source 1..23: mol_type = other RNA
tggaacaggacctcttcaatctc

SEQ ID NO: 130 - RNA, 23 nt, synthetic construct
  source 1..23: mol_type = other RNA
atcatagcattgaaaagaaatct

SEQ ID NO: 131 - RNA, 23 nt, synthetic construct
  source 1..23: mol_type = other RNA
cttttatgcaatctgctctggca

SEQ ID NO: 132 - RNA, 23 nt, synthetic construct
  source 1..23: mol_type = other RNA
atttggttgagcttctctgtgac

SEQ ID NO: 133 - RNA, 21 nt, synthetic construct
  source 1..21: mol_type = other RNA
  modified_base 1: mod_base = OTHER; note = 2'-deoxy-2'-fluoroadenosine-3'-phosphorothioate
  modified_base 2: mod_base = OTHER; note = 2'-O-methyluridine-3'-phosphorothioate
  modified_base 3: mod_base = OTHER; note = 2'-deoxy-2'-fluorouridine-3'-phosphate
  modified_base 4: mod_base = OTHER; note = 2'-O-methylcytidine-3'-phosphate
  modified_base 5: mod_base = OTHER; note = 2'-deoxy-2'-fluorocytidine-3'-phosphate
  modified_base 6: mod_base = OTHER; note = 2'-O-methyluridine-3'-phosphate
  modified_base 7: mod_base = OTHER; note = 2'-deoxy-2'-fluoroguanosine-3'-phosphate
  modified_base 8: mod_base = OTHER; note = 2'-O-methyladenosine-3'-phosphate
  modified_base 9: mod_base = OTHER; note = 2'-deoxy-2'-fluoroadenosine-3'-phosphate
  modified_base 10: mod_base = OTHER; note = 2'-deoxy-2'-fluorouridine-3'-phosphate
  modified_base 11: mod_base = OTHER; note = 2'-deoxy-2'-fluorouridine-3'-phosphate
  modified_base 12: mod_base = OTHER; note = 2'-O-methyluridine-3'-phosphate
  modified_base 13: mod_base = OTHER; note = 2'-deoxy-2'-fluorouridine-3'-phosphate
  modified_base 14: mod_base = OTHER; note = 2'-O-methyladenosine-3'-phosphate
  modified_base 15: mod_base = OTHER; note = 2'-deoxy-2'-fluorouridine-3'-phosphate
  modified_base 16: mod_base = OTHER; note = 2'-O-methylguanosine-3'-phosphate
  modified_base 17: mod_base = OTHER; note = 2'-deoxy-2'-fluoroadenosine-3'-phosphate
  modified_base 18: mod_base = OTHER; note = 2'-O-methylcytidine-3'-phosphate
  modified_base 19: mod_base = OTHER; note = 2'-deoxy-2'-fluorouridine-3'-phosphate
  modified_base 20: mod_base = OTHER; note = 2'-O-methyladenosine-3'-phosphate
  modified_base 21: mod_base = OTHER; note = 2'-deoxy-2'-fluorouridine-3'-phosphate ((2S,4R)-1-[29-[[2-(acetylamino)-2-deoxy-beta-D-galactopyra nosyl]oxy]-14,14-bis[[3-[[3-[[5-[[2-(acetylamino)-2-deoxy-b eta-D-galactopyranosyl]oxy]-1-oxopentyl]amino]propyl]amino] -3-oxopropoxy]methyl]-1,12,19,25-tetraoxo-16-oxa-13,20,24-t riazanonacos-1-yl]-4-hydroxy-2-pyrrolidinyl)methyl ester
attcctgaattttatgactat

SEQ ID NO: 134 - RNA, 21 nt, synthetic construct
  source 1..21: mol_type = other RNA
  modified_base 1: mod_base = OTHER; note = 2'-deoxy-2'-fluorocytidine-3'-phosphorothioate
  modified_base 2: mod_base = OTHER; note = 2'-O-methylcytidine-3'-phosphorothioate
  modified_base 3: mod_base = OTHER; note = 2'-deoxy-2'-fluorouridine-3'-phosphate
  modified_base 4: mod_base = OTHER; note = 2'-O-methylguanosine-3'-phosphate
  modified_base 5: mod_base = OTHER; note = 2'-deoxy-2'-fluoroadenosine-3'-phosphate
  modified_base 6: mod_base = OTHER; note = 2'-O-methyluridine-3'-phosphate
  modified_base 7: mod_base = OTHER; note = 2'-deoxy-2'-fluorocytidine-3'-phosphate
  modified_base 8: mod_base = OTHER; note = 2'-O-methyladenosine-3'-phosphate
  modified_base 9: mod_base = OTHER; note = 2'-deoxy-2'-fluoroadenosine-3'-phosphate
  modified_base 10: mod_base = OTHER; note = 2'-deoxy-2'-fluoroguanosine-3'-phosphate
  modified_base 11: mod_base = OTHER; note = 2'-deoxy-2'-fluorocytidine-3'-phosphate
  modified_base 12: mod_base = OTHER; note = 2'-O-methyluridine-3'-phosphate
  modified_base 13: mod_base = OTHER; note = 2'-deoxy-2'-fluorocytidine-3'-phosphate
  modified_base 14: mod_base = OTHER; note = 2'-O-methyladenosine-3'-phosphate
  modified_base 15: mod_base = OTHER; note = 2'-deoxy-2'-fluoroadenosine-3'-phosphate
  modified_base 16: mod_base = OTHER; note = 2'-O-methylguanosine-3'-phosphate
  modified_base 17: mod_base = OTHER; note = 2'-deoxy-2'-fluoroadenosine-3'-phosphate
  modified_base 18: mod_base = OTHER; note = 2'-O-methyladenosine-3'-phosphate
  modified_base 19: mod_base = OTHER; note = 2'-deoxy-2'-fluorouridine-3'-phosphate
  modified_base 20: mod_base = OTHER; note = 2'-O-methyladenosine-3'-phosphate
  modified_base 21: mod_base = OTHER; note = 2'-deoxy-2'-fluoroadenosine-3'-phosphate ((2S,4R)-1-[29-[[2-(acetylamino)-2-deoxy-beta-D-galactopyra nosyl]oxy]-14,14-bis[[3-[[3-[[5-[[2-(acetylamino)-2-deoxy-b eta-D-galactopyranosyl]oxy]-1-oxopentyl]amino]propyl]amino] -3-oxopropoxy]methyl]-1,12,19,25-tetraoxo-16-oxa-13,20,24-t riazanonacos-1-yl]-4-hydroxy-2-pyrrolidinyl)methyl ester
cctgatcaagctcaagaataa

SEQ ID NO: 135 - RNA, 21 nt, synthetic construct
  source 1..21: mol_type = other RNA
  modified_base 1: mod_base = OTHER; note = 2'-deoxy-2'-fluoroguanosine-3'-phosphorothioate
  modified_base 2: mod_base = OTHER; note = 2'-O-methyladenosine-3'-phosphorothioate
  modified_base 3: mod_base = OTHER; note = 2'-deoxy-2'-fluoroadenosine-3'-phosphate
  modified_base 4: mod_base = OTHER; note = 2'-O-methylguanosine-3'-phosphate
  modified_base 5: mod_base = OTHER; note = 2'-deoxy-2'-fluorocytidine-3'-phosphate
  modified_base 6: mod_base = OTHER; note = 2'-O-methyladenosine-3'-phosphate
  modified_base 7: mod_base = OTHER; note = 2'-deoxy-2'-fluoroguanosine-3'-phosphate
  modified_base 8: mod_base = OTHER; note = 2'-O-methylguanosine-3'-phosphate
  modified_base 9: mod_base = OTHER; note = 2'-deoxy-2'-fluoroadenosine-3'-phosphate
  modified_base 10: mod_base = OTHER; note = 2'-deoxy-2'-fluoroadenosine-3'-phosphate
  modified_base 11: mod_base = OTHER; note = 2'-deoxy-2'-fluorouridine-3'-phosphate
  modified_base 12: mod_base = OTHER; note = 2'-O-methyluridine-3'-phosphate
  modified_base 13: mod_base = OTHER; note = 2'-deoxy-2'-fluorocytidine-3'-phosphate
  modified_base 14: mod_base = OTHER; note = 2'-O-methylcytidine-3'-phosphate
  modified_base 15: mod_base = OTHER; note = 2'-deoxy-2'-fluorouridine-3'-phosphate
  modified_base 16: mod_base = OTHER; note = 2'-O-methylguanosine-3'-phosphate
  modified_base 17: mod_base = OTHER; note = 2'-deoxy-2'-fluoroadenosine-3'-phosphate
  modified_base 18: mod_base = OTHER; note = 2'-O-methyladenosine-3'-phosphate
  modified_base 19: mod_base = OTHER; note = 2'-deoxy-2'-fluorouridine-3'-phosphate
  modified_base 20: mod_base = OTHER; note = 2'-O-methyluridine-3'-phosphate
  modified_base 21: mod_base = OTHER; note = 2'-deoxy-2'-fluorouridine-3'-phosphate ((2S,4R)-1-[29-[[2-(acetylamino)-2-deoxy-beta-D-galactopyra nosyl]oxy]-14,14-bis[[3-[[3-[[5-[[2-(acetylamino)-2-deoxy-b eta-D-galactopyranosyl]oxy]-1-oxopentyl]amino]propyl]amino] -3-oxopropoxy]methyl]-1,12,19,25-tetraoxo-16-oxa-13,20,24-t riazanonacos-1-yl]-4-hydroxy-2-pyrrolidinyl)methyl ester
gaagcaggaattcctgaattt

SEQ ID NO: 136 - RNA, 21 nt, synthetic construct
  source 1..21: mol_type = other RNA
  modified_base 1: mod_base = OTHER; note = 2'-deoxy-2'-fluoroadenosine-3'-phosphorothioate
  modified_base 2: mod_base = OTHER; note = 2'-O-methylguanosine-3'-phosphorothioate
  modified_base 3: mod_base = OTHER; note = 2'-deoxy-2'-fluorocytidine-3'-phosphate
  modified_base 4: mod_base = OTHER; note = 2'-O-methyladenosine-3'-phosphate
  modified_base 5: mod_base = OTHER; note = 2'-deoxy-2'-fluoroadenosine-3'-phosphate
  modified_base 6: mod_base = OTHER; note = 2'-O-methylcytidine-3'-phosphate
  modified_base 7: mod_base = OTHER; note = 2'-deoxy-2'-fluoroadenosine-3'-phosphate
  modified_base 8: mod_base = OTHER; note = 2'-O-methyluridine-3'-phosphate
  modified_base 9: mod_base = OTHER; note = 2'-deoxy-2'-fluoroguanosine-3'-phosphate
  modified_base 10: mod_base = OTHER; note = 2'-deoxy-2'-fluorouridine-3'-phosphate
  modified_base 11: mod_base = OTHER; note = 2'-deoxy-2'-fluoroguanosine-3'-phosphate
  modified_base 12: mod_base = OTHER; note = 2'-O-methyluridine-3'-phosphate
  modified_base 13: mod_base = OTHER; note = 2'-deoxy-2'-fluorouridine-3'-phosphate
  modified_base 14: mod_base = OTHER; note = 2'-O-methylcytidine-3'-phosphate
  modified_base 15: mod_base = OTHER; note = 2'-deoxy-2'-fluoroadenosine-3'-phosphate
  modified_base 16: mod_base = OTHER; note = 2'-O-methyladenosine-3'-phosphate
  modified_base 17: mod_base = OTHER; note = 2'-deoxy-2'-fluoroadenosine-3'-phosphate
  modified_base 18: mod_base = OTHER; note = 2'-O-methylguanosine-3'-phosphate
  modified_base 19: mod_base = OTHER; note = 2'-deoxy-2'-fluorouridine-3'-phosphate
  modified_base 20: mod_base = OTHER; note = 2'-O-methylcytidine-3'-phosphate
  modified_base 21: mod_base = OTHER; note = 2'-deoxy-2'-fluoroadenosine-3'-phosphate ((2S,4R)-1-[29-[[2-(acetylamino)-2-deoxy-beta-D-galactopyra nosyl]oxy]-14,14-bis[[3-[[3-[[5-[[2-(acetylamino)-2-deoxy-b eta-D-galactopyranosyl]oxy]-1-oxopentyl]amino]propyl]amino] -3-oxopropoxy]methyl]-1,12,19,25-tetraoxo-16-oxa-13,20,24-t riazanonacos-1-yl]-4-hydroxy-2-pyrrolidinyl)methyl ester
agcaacatgtgttcaaagtca

SEQ ID NO: 137 - RNA, 21 nt, synthetic construct
  source 1..21: mol_type = other RNA
  modified_base 1: mod_base = OTHER; note = 2'-deoxy-2'-fluoroguanosine-3'-phosphorothioate
  modified_base 2: mod_base = OTHER; note = 2'-O-methylcytidine-3'-phosphorothioate
  modified_base 3: mod_base = OTHER; note = 2'-deoxy-2'-fluorouridine-3'-phosphate
  modified_base 4: mod_base = OTHER; note = 2'-O-methylguanosine-3'-phosphate
  modified_base 5: mod_base = OTHER; note = 2'-deoxy-2'-fluorouridine-3'-phosphate
  modified_base 6: mod_base = OTHER; note = 2'-O-methylguanosine-3'-phosphate
  modified_base 7: mod_base = OTHER; note = 2'-deoxy-2'-fluoroguanosine-3'-phosphate
  modified_base 8: mod_base = OTHER; note = 2'-O-methyluridine-3'-phosphate
  modified_base 9: mod_base = OTHER; note = 2'-deoxy-2'-fluoroguanosine-3'-phosphate
  modified_base 10: mod_base = OTHER; note = 2'-deoxy-2'-fluorouridine-3'-phosphate
  modified_base 11: mod_base = OTHER; note = 2'-deoxy-2'-fluorocytidine-3'-phosphate
  modified_base 12: mod_base = OTHER; note = 2'-O-methyluridine-3'-phosphate
  modified_base 13: mod_base = OTHER; note = 2'-deoxy-2'-fluoroguanosine-3'-phosphate
  modified_base 14: mod_base = OTHER; note = 2'-O-methyladenosine-3'-phosphate
  modified_base 15: mod_base = OTHER; note = 2'-deoxy-2'-fluoroguanosine-3'-phosphate
  modified_base 16: mod_base = OTHER; note = 2'-O-methyluridine-3'-phosphate
  modified_base 17: mod_base = OTHER; note = 2'-deoxy-2'-fluoroadenosine-3'-phosphate
  modified_base 18: mod_base = OTHER; note = 2'-O-methylcytidine-3'-phosphate
  modified_base 19: mod_base = OTHER; note = 2'-deoxy-2'-fluorouridine-3'-phosphate
  modified_base 20: mod_base = OTHER; note = 2'-O-methyluridine-3'-phosphate
  modified_base 21: mod_base = OTHER; note = 2'-deoxy-2'-fluorouridine-3'-phosphate ((2S,4R)-1-[29-[[2-(acetylamino)-2-deoxy-beta-D-galactopyra nosyl]oxy]-14,14-bis[[3-[[3-[[5-[[2-(acetylamino)-2-deoxy-b eta-D-galactopyranosyl]oxy]-1-oxopentyl]amino]propyl]amino] -3-oxopropoxy]methyl]-1,12,19,25-tetraoxo-16-oxa-13,20,24-t riazanonacos-1-yl]-4-hydroxy-2-pyrrolidinyl)methyl ester
gctgtggtgtctgagtacttt

SEQ ID NO: 138 - RNA, 21 nt, synthetic construct
  source 1..21: mol_type = other RNA
  modified_base 1: mod_base = OTHER; note = 2'-deoxy-2'-fluoroadenosine-3'-phosphorothioate
  modified_base 2: mod_base = OTHER; note = 2'-O-methyladenosine-3'-phosphorothioate
  modified_base 3: mod_base = OTHER; note = 2'-deoxy-2'-fluoroguanosine-3'-phosphate
  modified_base 4: mod_base = OTHER; note = 2'-O-methyluridine-3'-phosphate
  modified_base 5: mod_base = OTHER; note = 2'-deoxy-2'-fluoroguanosine-3'-phosphate
  modified_base 6: mod_base = OTHER; note = 2'-O-methyluridine-3'-phosphate
  modified_base 7: mod_base = OTHER; note = 2'-deoxy-2'-fluorocytidine-3'-phosphate
  modified_base 8: mod_base = OTHER; note = 2'-O-methyluridine-3'-phosphate
  modified_base 9: mod_base = OTHER; note = 2'-deoxy-2'-fluoroadenosine-3'-phosphate
  modified_base 10: mod_base = OTHER; note = 2'-deoxy-2'-fluoroguanosine-3'-phosphate
  modified_base 11: mod_base = OTHER; note = 2'-deoxy-2'-fluorouridine-3'-phosphate
  modified_base 12: mod_base = OTHER; note = 2'-O-methylcytidine-3'-phosphate
  modified_base 13: mod_base = OTHER; note = 2'-deoxy-2'-fluoroadenosine-3'-phosphate
  modified_base 14: mod_base = OTHER; note = 2'-O-methyladenosine-3'-phosphate
  modified_base 15: mod_base = OTHER; note = 2'-deoxy-2'-fluorocytidine-3'-phosphate
  modified_base 16: mod_base = OTHER; note = 2'-O-methyluridine-3'-phosphate
  modified_base 17: mod_base = OTHER; note = 2'-deoxy-2'-fluorouridine-3'-phosphate
  modified_base 18: mod_base = OTHER; note = 2'-O-methyladenosine-3'-phosphate
  modified_base 19: mod_base = OTHER; note = 2'-deoxy-2'-fluoroadenosine-3'-phosphate
  modified_base 20: mod_base = OTHER; note = 2'-O-methyluridine-3'-phosphate
  modified_base 21: mod_base = OTHER; note = 2'-deoxy-2'-fluorouridine-3'-phosphate ((2S,4R)-1-[29-[[2-(acetylamino)-2-deoxy-beta-D-galactopyra nosyl]oxy]-14,14-bis[[3-[[3-[[5-[[2-(acetylamino)-2-deoxy-b eta-D-galactopyranosyl]oxy]-1-oxopentyl]amino]propyl]amino] -3-oxopropoxy]methyl]-1,12,19,25-tetraoxo-16-oxa-13,20,24-t riazanonacos-1-yl]-4-hydroxy-2-pyrrolidinyl)methyl ester
aagtgtctagtcaacttaatt

SEQ ID NO: 139 - RNA, 21 nt, synthetic construct
  source 1..21: mol_type = other RNA
  modified_base 1: mod_base = OTHER; note = 2'-deoxy-2'-fluoroadenosine-3'-phosphorothioate
  modified_base 2: mod_base = OTHER; note = 2'-O-methylguanosine-3'-phosphorothioate
  modified_base 3: mod_base = OTHER; note = 2'-deoxy-2'-fluorocytidine-3'-phosphate
  modified_base 4: mod_base = OTHER; note = 2'-O-methyluridine-3'-phosphate
  modified_base 5: mod_base = OTHER; note = 2'-deoxy-2'-fluoroguanosine-3'-phosphate
  modified_base 6: mod_base = OTHER; note = 2'-O-methyluridine-3'-phosphate
  modified_base 7: mod_base = OTHER; note = 2'-deoxy-2'-fluoroguanosine-3'-phosphate
  modified_base 8: mod_base = OTHER; note = 2'-O-methyladenosine-3'-phosphate
  modified_base 9: mod_base = OTHER; note = 2'-deoxy-2'-fluoroguanosine-3'-phosphate
  modified_base 10: mod_base = OTHER; note = 2'-deoxy-2'-fluoroadenosine-3'-phosphate
  modified_base 11: mod_base = OTHER; note = 2'-deoxy-2'-fluoroguanosine-3'-phosphate
  modified_base 12: mod_base = OTHER; note = 2'-O-methyladenosine-3'-phosphate
  modified_base 13: mod_base = OTHER; note = 2'-deoxy-2'-fluoroguanosine-3'-phosphate
  modified_base 14: mod_base = OTHER; note = 2'-O-methyladenosine-3'-phosphate
  modified_base 15: mod_base = OTHER; note = 2'-deoxy-2'-fluorouridine-3'-phosphate
  modified_base 16: mod_base = OTHER; note = 2'-O-methylguanosine-3'-phosphate
  modified_base 17: mod_base = OTHER; note = 2'-deoxy-2'-fluorocytidine-3'-phosphate
  modified_base 18: mod_base = OTHER; note = 2'-O-methyluridine-3'-phosphate
  modified_base 19: mod_base = OTHER; note = 2'-deoxy-2'-fluorocytidine-3'-phosphate
  modified_base 20: mod_base = OTHER; note = 2'-O-methyladenosine-3'-phosphate
  modified_base 21: mod_base = OTHER; note = 2'-deoxy-2'-fluoroadenosine-3'-phosphate ((2S,4R)-1-[29-[[2-(acetylamino)-2-deoxy-beta-D-galactopyra nosyl]oxy]-14,14-bis[[3-[[3-[[5-[[2-(acetylamino)-2-deoxy-b eta-D-galactopyranosyl]oxy]-1-oxopentyl]amino]propyl]amino] -3-oxopropoxy]methyl]-1,12,19,25-tetraoxo-16-oxa-13,20,24-t riazanonacos-1-yl]-4-hydroxy-2-pyrrolidinyl)methyl ester
agctgtgagagagatgctcaa

SEQ ID NO: 140 - RNA, 21 nt, synthetic construct
  source 1..21: mol_type = other RNA
  modified_base 1: mod_base = OTHER; note = 2'-deoxy-2'-fluoroadenosine-3'-phosphorothioate
  modified_base 2: mod_base = OTHER; note = 2'-O-methylguanosine-3'-phosphorothioate
  modified_base 3: mod_base = OTHER; note = 2'-deoxy-2'-fluorocytidine-3'-phosphate
  modified_base 4: mod_base = OTHER; note = 2'-O-methylcytidine-3'-phosphate
  modified_base 5: mod_base = OTHER; note = 2'-deoxy-2'-fluoroadenosine-3'-phosphate
  modified_base 6: mod_base = OTHER; note = 2'-O-methyladenosine-3'-phosphate
  modified_base 7: mod_base = OTHER; note = 2'-deoxy-2'-fluoroadenosine-3'-phosphate
  modified_base 8: mod_base = OTHER; note = 2'-O-methyladenosine-3'-phosphate
  modified_base 9: mod_base = OTHER; note = 2'-deoxy-2'-fluoroadenosine-3'-phosphate
  modified_base 10: mod_base = OTHER; note = 2'-deoxy-2'-fluoroguanosine-3'-phosphate
  modified_base 11: mod_base = OTHER; note = 2'-deoxy-2'-fluorouridine-3'-phosphate
  modified_base 12: mod_base = OTHER; note = 2'-O-methylguanosine-3'-phosphate
  modified_base 13: mod_base = OTHER; note = 2'-deoxy-2'-fluorouridine-3'-phosphate
  modified_base 14: mod_base = OTHER; note = 2'-O-methylcytidine-3'-phosphate
  modified_base 15: mod_base = OTHER; note = 2'-deoxy-2'-fluorouridine-3'-phosphate
  modified_base 16: mod_base = OTHER; note = 2'-O-methyladenosine-3'-phosphate
  modified_base 17: mod_base = OTHER; note = 2'-deoxy-2'-fluoroguanosine-3'-phosphate
  modified_base 18: mod_base = OTHER; note = 2'-O-methyluridine-3'-phosphate
  modified_base 19: mod_base = OTHER; note = 2'-deoxy-2'-fluorocytidine-3'-phosphate
  modified_base 20: mod_base = OTHER; note = 2'-O-methyladenosine-3'-phosphate
  modified_base 21: mod_base = OTHER; note = 2'-deoxy-2'-fluoroadenosine-3'-phosphate ((2S,4R)-1-[29-[[2-(acetylamino)-2-deoxy-beta-D-galactopyra nosyl]oxy]-14,14-bis[[3-[[3-[[5-[[2-(acetylamino)-2-deoxy-b eta-D-galactopyranosyl]oxy]-1-oxopentyl]amino]propyl]amino] -3-oxopropoxy]methyl]-1,12,19,25-tetraoxo-16-oxa-13,20,24-t riazanonacos-1-yl]-4-hydroxy-2-pyrrolidinyl)methyl ester
agccaaaaagtgtctagtcaa

SEQ ID NO: 141 - RNA, 21 nt, synthetic construct
  source 1..21: mol_type = other RNA
  modified_base 1: mod_base = OTHER; note = 2'-deoxy-2'-fluorouridine-3'-phosphorothioate
  modified_base 2: mod_base = OTHER; note = 2'-O-methylguanosine-3'-phosphorothioate
  modified_base 3: mod_base = OTHER; note = 2'-deoxy-2'-fluorouridine-3'-phosphate
  modified_base 4: mod_base = OTHER; note = 2'-O-methylguanosine-3'-phosphate
  modified_base 5: mod_base = OTHER; note = 2'-deoxy-2'-fluoroadenosine-3'-phosphate
  modified_base 6: mod_base = OTHER; note = 2'-O-methylguanosine-3'-phosphate
  modified_base 7: mod_base = OTHER; note = 2'-deoxy-2'-fluorouridine-3'-phosphate
  modified_base 8: mod_base = OTHER; note = 2'-O-methylguanosine-3'-phosphate
  modified_base 9: mod_base = OTHER; note = 2'-deoxy-2'-fluoroadenosine-3'-phosphate
  modified_base 10: mod_base = OTHER; note = 2'-deoxy-2'-fluorouridine-3'-phosphate
  modified_base 11: mod_base = OTHER; note = 2'-deoxy-2'-fluoroguanosine-3'-phosphate
  modified_base 12: mod_base = OTHER; note = 2'-O-methyladenosine-3'-phosphate
  modified_base 13: mod_base = OTHER; note = 2'-deoxy-2'-fluoroguanosine-3'-phosphate
  modified_base 14: mod_base = OTHER; note = 2'-O-methyladenosine-3'-phosphate
  modified_base 15: mod_base = OTHER; note = 2'-deoxy-2'-fluorouridine-3'-phosphate
  modified_base 16: mod_base = OTHER; note = 2'-O-methylcytidine-3'-phosphate
  modified_base 17: mod_base = OTHER; note = 2'-deoxy-2'-fluorouridine-3'-phosphate
  modified_base 18: mod_base = OTHER; note = 2'-O-methylcytidine-3'-phosphate
  modified_base 19: mod_base = OTHER; note = 2'-deoxy-2'-fluorouridine-3'-phosphate
  modified_base 20: mod_base = OTHER; note = 2'-O-methyluridine-3'-phosphate
  modified_base 21: mod_base = OTHER; note = 2'-deoxy-2'-fluorouridine-3'-phosphate ((2S,4R)-1-[29-[[2-(acetylamino)-2-deoxy-beta-D-galactopyra nosyl]oxy]-14,14-bis[[3-[[3-[[5-[[2-(acetylamino)-2-deoxy-b eta-D-galactopyranosyl]oxy]-1-oxopentyl]amino]propyl]amino] -3-oxopropoxy]methyl]-1,12,19,25-tetraoxo-16-oxa-13,20,24-t riazanonacos-1-yl]-4-hydroxy-2-pyrrolidinyl)methyl ester
tgtgagtgatgagatctcttt

SEQ ID NO: 142 - RNA, 21 nt, synthetic construct
  source 1..21: mol_type = other RNA
  modified_base 1: mod_base = OTHER; note = 2'-deoxy-2'-fluoroadenosine-3'-phosphorothioate
  modified_base 2: mod_base = OTHER; note = 2'-O-methyladenosine-3'-phosphorothioate
  modified_base 3: mod_base = OTHER; note = 2'-deoxy-2'-fluorouridine-3'-phosphate
  modified_base 4: mod_base = OTHER; note = 2'-O-methyluridine-3'-phosphate
  modified_base 5: mod_base = OTHER; note = 2'-deoxy-2'-fluoroguanosine-3'-phosphate
  modified_base 6: mod_base = OTHER; note = 2'-O-methyladenosine-3'-phosphate
  modified_base 7: mod_base = OTHER; note = 2'-deoxy-2'-fluoroguanosine-3'-phosphate
  modified_base 8: mod_base = OTHER; note = 2'-O-methyladenosine-3'-phosphate
  modified_base 9: mod_base = OTHER; note = 2'-deoxy-2'-fluoroadenosine-3'-phosphate
  modified_base 10: mod_base = OTHER; note = 2'-deoxy-2'-fluoroguanosine-3'-phosphate
  modified_base 11: mod_base = OTHER; note = 2'-deoxy-2'-fluoroguanosine-3'-phosphate
  modified_base 12: mod_base = OTHER; note = 2'-O-methyluridine-3'-phosphate
  modified_base 13: mod_base = OTHER; note = 2'-deoxy-2'-fluoroguanosine-3'-phosphate
  modified_base 14: mod_base = OTHER; note = 2'-O-methylguanosine-3'-phosphate
  modified_base 15: mod_base = OTHER; note = 2'-deoxy-2'-fluorocytidine-3'-phosphate
  modified_base 16: mod_base = OTHER; note = 2'-O-methyladenosine-3'-phosphate
  modified_base 17: mod_base = OTHER; note = 2'-deoxy-2'-fluoroadenosine-3'-phosphate
  modified_base 18: mod_base = OTHER; note = 2'-O-methylguanosine-3'-phosphate
  modified_base 19: mod_base = OTHER; note = 2'-deoxy-2'-fluorouridine-3'-phosphate
  modified_base 20: mod_base = OTHER; note = 2'-O-methyluridine-3'-phosphate
  modified_base 21: mod_base = OTHER; note = 2'-deoxy-2'-fluoroadenosine-3'-phosphate ((2S,4R)-1-[29-[[2-(acetylamino)-2-deoxy-beta-D-galactopyra nosyl]oxy]-14,14-bis[[3-[[3-[[5-[[2-(acetylamino)-2-deoxy-b eta-D-galactopyranosyl]oxy]-1-oxopentyl]amino]propyl]amino] -3-oxopropoxy]methyl]-1,12,19,25-tetraoxo-16-oxa-13,20,24-t riazanonacos-1-yl]-4-hydroxy-2-pyrrolidinyl)methyl ester
aattgagaaggtggcaagtta

SEQ ID NO: 143 - RNA, 21 nt, synthetic construct
  source 1..21: mol_type = other RNA
  modified_base 1: mod_base = OTHER; note = 2'-deoxy-2'-fluorocytidine-3'-phosphorothioate
  modified_base 2: mod_base = OTHER; note = 2'-O-methyladenosine-3'-phosphorothioate
  modified_base 3: mod_base = OTHER; note = 2'-deoxy-2'-fluoroadenosine-3'-phosphate
  modified_base 4: mod_base = OTHER; note = 2'-O-methylcytidine-3'-phosphate
  modified_base 5: mod_base = OTHER; note = 2'-deoxy-2'-fluoroadenosine-3'-phosphate
  modified_base 6: mod_base = OTHER; note = 2'-O-methyluridine-3'-phosphate
  modified_base 7: mod_base = OTHER; note = 2'-deoxy-2'-fluoroguanosine-3'-phosphate
  modified_base 8: mod_base = OTHER; note = 2'-O-methyluridine-3'-phosphate
  modified_base 9: mod_base = OTHER; note = 2'-deoxy-2'-fluoroguanosine-3'-phosphate
  modified_base 10: mod_base = OTHER; note = 2'-deoxy-2'-fluorouridine-3'-phosphate
  modified_base 11: mod_base = OTHER; note = 2'-deoxy-2'-fluorouridine-3'-phosphate
  modified_base 12: mod_base = OTHER; note = 2'-O-methylcytidine-3'-phosphate
  modified_base 13: mod_base = OTHER; note = 2'-deoxy-2'-fluoroadenosine-3'-phosphate
  modified_base 14: mod_base = OTHER; note = 2'-O-methyladenosine-3'-phosphate
  modified_base 15: mod_base = OTHER; note = 2'-deoxy-2'-fluoroadenosine-3'-phosphate
  modified_base 16: mod_base = OTHER; note = 2'-O-methylguanosine-3'-phosphate
  modified_base 17: mod_base = OTHER; note = 2'-deoxy-2'-fluorouridine-3'-phosphate
  modified_base 18: mod_base = OTHER; note = 2'-O-methylcytidine-3'-phosphate
  modified_base 19: mod_base = OTHER; note = 2'-deoxy-2'-fluoroadenosine-3'-phosphate
  modified_base 20: mod_base = OTHER; note = 2'-O-methyladenosine-3'-phosphate
  modified_base 21: mod_base = OTHER; note = 2'-deoxy-2'-fluoroguanosine-3'-phosphate ((2S,4R)-1-[29-[[2-(acetylamino)-2-deoxy-beta-D-galactopyra nosyl]oxy]-14,14-bis[[3-[[3-[[5-[[2-(acetylamino)-2-deoxy-b eta-D-galactopyranosyl]oxy]-1-oxopentyl]amino]propyl]amino] -3-oxopropoxy]methyl]-1,12,19,25-tetraoxo-16-oxa-13,20,24-t riazanonacos-1-yl]-4-hydroxy-2-pyrrolidinyl)methyl ester
caacatgtgttcaaagtcaag

SEQ ID NO: 144 - RNA, 21 nt, synthetic construct
  source 1..21: mol_type = other RNA
  modified_base 1: mod_base = OTHER; note = 2'-deoxy-2'-fluorouridine-3'-phosphorothioate
  modified_base 2: mod_base = OTHER; note = 2'-O-methylguanosine-3'-phosphorothioate
  modified_base 3: mod_base = OTHER; note = 2'-deoxy-2'-fluorouridine-3'-phosphate
  modified_base 4: mod_base = OTHER; note = 2'-O-methylguanosine-3'-phosphate
  modified_base 5: mod_base = OTHER; note = 2'-deoxy-2'-fluoroadenosine-3'-phosphate
  modified_base 6: mod_base = OTHER; note = 2'-O-methylguanosine-3'-phosphate
  modified_base 7: mod_base = OTHER; note = 2'-deoxy-2'-fluoroadenosine-3'-phosphate
  modified_base 8: mod_base = OTHER; note = 2'-O-methylguanosine-3'-phosphate
  modified_base 9: mod_base = OTHER; note = 2'-deoxy-2'-fluoroadenosine-3'-phosphate
  modified_base 10: mod_base = OTHER; note = 2'-deoxy-2'-fluoroguanosine-3'-phosphate
  modified_base 11: mod_base = OTHER; note = 2'-deoxy-2'-fluoroadenosine-3'-phosphate
  modified_base 12: mod_base = OTHER; note = 2'-O-methyluridine-3'-phosphate
  modified_base 13: mod_base = OTHER; note = 2'-deoxy-2'-fluoroguanosine-3'-phosphate
  modified_base 14: mod_base = OTHER; note = 2'-O-methylcytidine-3'-phosphate
  modified_base 15: mod_base = OTHER; note = 2'-deoxy-2'-fluorouridine-3'-phosphate
  modified_base 16: mod_base = OTHER; note = 2'-O-methylcytidine-3'-phosphate
  modified_base 17: mod_base = OTHER; note = 2'-deoxy-2'-fluoroadenosine-3'-phosphate
  modified_base 18: mod_base = OTHER; note = 2'-O-methyladenosine-3'-phosphate
  modified_base 19: mod_base = OTHER; note = 2'-deoxy-2'-fluorouridine-3'-phosphate
  modified_base 20: mod_base = OTHER; note = 2'-O-methyladenosine-3'-phosphate
  modified_base 21: mod_base = OTHER; note = 2'-deoxy-2'-fluorouridine-3'-phosphate ((2S,4R)-1-[29-[[2-(acetylamino)-2-deoxy-beta-D-galactopyra nosyl]oxy]-14,14-bis[[3-[[3-[[5-[[2-(acetylamino)-2-deoxy-b eta-D-galactopyranosyl]oxy]-1-oxopentyl]amino]propyl]amino] -3-oxopropoxy]methyl]-1,12,19,25-tetraoxo-16-oxa-13,20,24-t riazanonacos-1-yl]-4-hydroxy-2-pyrrolidinyl)methyl ester
tgtgagagagatgctcaatat

SEQ ID NO: 145 - RNA, 21 nt, synthetic construct
  source 1..21: mol_type = other RNA
  modified_base 1: mod_base = OTHER; note = 2'-deoxy-2'-fluoroguanosine-3'-phosphorothioate
  modified_base 2: mod_base = OTHER; note = 2'-O-methyluridine-3'-phosphorothioate
  modified_base 3: mod_base = OTHER; note = 2'-deoxy-2'-fluorocytidine-3'-phosphate
  modified_base 4: mod_base = OTHER; note = 2'-O-methyluridine-3'-phosphate
  modified_base 5: mod_base = OTHER; note = 2'-deoxy-2'-fluoroadenosine-3'-phosphate
  modified_base 6: mod_base = OTHER; note = 2'-O-methylguanosine-3'-phosphate
  modified_base 7: mod_base = OTHER; note = 2'-deoxy-2'-fluorouridine-3'-phosphate
  modified_base 8: mod_base = OTHER; note = 2'-O-methylcytidine-3'-phosphate
  modified_base 9: mod_base = OTHER; note = 2'-deoxy-2'-fluoroadenosine-3'-phosphate
  modified_base 10: mod_base = OTHER; note = 2'-deoxy-2'-fluoroadenosine-3'-phosphate
  modified_base 11: mod_base = OTHER; note = 2'-deoxy-2'-fluorocytidine-3'-phosphate
  modified_base 12: mod_base = OTHER; note = 2'-O-methyluridine-3'-phosphate
  modified_base 13: mod_base = OTHER; note = 2'-deoxy-2'-fluorouridine-3'-phosphate
  modified_base 14: mod_base = OTHER; note = 2'-O-methyladenosine-3'-phosphate
  modified_base 15: mod_base = OTHER; note = 2'-deoxy-2'-fluoroadenosine-3'-phosphate
  modified_base 16: mod_base = OTHER; note = 2'-O-methyluridine-3'-phosphate
  modified_base 17: mod_base = OTHER; note = 2'-deoxy-2'-fluorouridine-3'-phosphate
  modified_base 18: mod_base = OTHER; note = 2'-O-methylguanosine-3'-phosphate
  modified_base 19: mod_base = OTHER; note = 2'-deoxy-2'-fluoroadenosine-3'-phosphate
  modified_base 20: mod_base = OTHER; note = 2'-O-methylguanosine-3'-phosphate
  modified_base 21: mod_base = OTHER; note = 2'-deoxy-2'-fluoroadenosine-3'-phosphate ((2S,4R)-1-[29-[[2-(acetylamino)-2-deoxy-beta-D-galactopyra nosyl]oxy]-14,14-bis[[3-[[3-[[5-[[2-(acetylamino)-2-deoxy-b eta-D-galactopyranosyl]oxy]-1-oxopentyl]amino]propyl]amino] -3-oxopropoxy]methyl]-1,12,19,25-tetraoxo-16-oxa-13,20,24-t riazanonacos-1-yl]-4-hydroxy-2-pyrrolidinyl)methyl ester
gtctagtcaacttaattgaga

SEQ ID NO: 146 - RNA, 21 nt, synthetic construct
  source 1..21: mol_type = other RNA
  modified_base 1: mod_base = OTHER; note = 2'-deoxy-2'-fluorouridine-3'-phosphorothioate
  modified_base 2: mod_base = OTHER; note = 2'-O-methylcytidine-3'-phosphorothioate
  modified_base 3: mod_base = OTHER; note = 2'-deoxy-2'-fluorocytidine-3'-phosphate
  modified_base 4: mod_base = OTHER; note = 2'-O-methyladenosine-3'-phosphate
  modified_base 5: mod_base = OTHER; note = 2'-deoxy-2'-fluoroadenosine-3'-phosphate
  modified_base 6: mod_base = OTHER; note = 2'-O-methylguanosine-3'-phosphate
  modified_base 7: mod_base = OTHER; note = 2'-deoxy-2'-fluoroadenosine-3'-phosphate
  modified_base 8: mod_base = OTHER; note = 2'-O-methyladenosine-3'-phosphate
  modified_base 9: mod_base = OTHER; note = 2'-deoxy-2'-fluoroadenosine-3'-phosphate
  modified_base 10: mod_base = OTHER; note = 2'-deoxy-2'-fluoroguanosine-3'-phosphate
  modified_base 11: mod_base = OTHER; note = 2'-deoxy-2'-fluoroadenosine-3'-phosphate
  modified_base 12: mod_base = OTHER; note = 2'-O-methylcytidine-3'-phosphate
  modified_base 13: mod_base = OTHER; note = 2'-deoxy-2'-fluoroadenosine-3'-phosphate
  modified_base 14: mod_base = OTHER; note = 2'-O-methyladenosine-3'-phosphate
  modified_base 15: mod_base = OTHER; note = 2'-deoxy-2'-fluorouridine-3'-phosphate
  modified_base 16: mod_base = OTHER; note = 2'-O-methylguanosine-3'-phosphate
  modified_base 17: mod_base = OTHER; note = 2'-deoxy-2'-fluoroadenosine-3'-phosphate
  modified_base 18: mod_base = OTHER; note = 2'-O-methylguanosine-3'-phosphate
  modified_base 19: mod_base = OTHER; note = 2'-deoxy-2'-fluorocytidine-3'-phosphate
  modified_base 20: mod_base = OTHER; note = 2'-O-methyladenosine-3'-phosphate
  modified_base 21: mod_base = OTHER; note = 2'-deoxy-2'-fluoroadenosine-3'-phosphate ((2S,4R)-1-[29-[[2-(acetylamino)-2-deoxy-beta-D-galactopyra nosyl]oxy]-14,14-bis[[3-[[3-[[5-[[2-(acetylamino)-2-deoxy-b eta-D-galactopyranosyl]oxy]-1-oxopentyl]amino]propyl]amino] -3-oxopropoxy]methyl]-1,12,19,25-tetraoxo-16-oxa-13,20,24-t riazanonacos-1-yl]-4-hydroxy-2-pyrrolidinyl)methyl ester
tccaagaaagacaatgagcaa

SEQ ID NO: 147 - RNA, 21 nt, synthetic construct
  source 1..21: mol_type = other RNA
  modified_base 1: mod_base = OTHER; note = 2'-deoxy-2'-fluorouridine-3'-phosphorothioate
  modified_base 2: mod_base = OTHER; note = 2'-O-methylguanosine-3'-phosphorothioate
  modified_base 3: mod_base = OTHER; note = 2'-deoxy-2'-fluorouridine-3'-phosphate
  modified_base 4: mod_base = OTHER; note = 2'-O-methylguanosine-3'-phosphate
  modified_base 5: mod_base = OTHER; note = 2'-deoxy-2'-fluorouridine-3'-phosphate
  modified_base 6: mod_base = OTHER; note = 2'-O-methyluridine-3'-phosphate
  modified_base 7: mod_base = OTHER; note = 2'-deoxy-2'-fluorocytidine-3'-phosphate
  modified_base 8: mod_base = OTHER; note = 2'-O-methyladenosine-3'-phosphate
  modified_base 9: mod_base = OTHER; note = 2'-deoxy-2'-fluoroadenosine-3'-phosphate
  modified_base 10: mod_base = OTHER; note = 2'-deoxy-2'-fluoroadenosine-3'-phosphate
  modified_base 11: mod_base = OTHER; note = 2'-deoxy-2'-fluoroguanosine-3'-phosphate
  modified_base 12: mod_base = OTHER; note = 2'-O-methyluridine-3'-phosphate
  modified_base 13: mod_base = OTHER; note = 2'-deoxy-2'-fluorocytidine-3'-phosphate
  modified_base 14: mod_base = OTHER; note = 2'-O-methyladenosine-3'-phosphate
  modified_base 15: mod_base = OTHER; note = 2'-deoxy-2'-fluoroadenosine-3'-phosphate
  modified_base 16: mod_base = OTHER; note = 2'-O-methylguanosine-3'-phosphate
  modified_base 17: mod_base = OTHER; note = 2'-deoxy-2'-fluoroguanosine-3'-phosphate
  modified_base 18: mod_base = OTHER; note = 2'-O-methyladenosine-3'-phosphate
  modified_base 19: mod_base = OTHER; note = 2'-deoxy-2'-fluorouridine-3'-phosphate
  modified_base 20: mod_base = OTHER; note = 2'-O-methyladenosine-3'-phosphate
  modified_base 21: mod_base = OTHER; note = 2'-deoxy-2'-fluorouridine-3'-phosphate ((2S,4R)-1-[29-[[2-(acetylamino)-2-deoxy-beta-D-galactopyra nosyl]oxy]-14,14-bis[[3-[[3-[[5-[[2-(acetylamino)-2-deoxy-b eta-D-galactopyranosyl]oxy]-1-oxopentyl]amino]propyl]amino] -3-oxopropoxy]methyl]-1,12,19,25-tetraoxo-16-oxa-13,20,24-t riazanonacos-1-yl]-4-hydroxy-2-pyrrolidinyl)methyl ester
tgtgttcaaagtcaaggatat

SEQ ID NO: 148 - RNA, 21 nt, synthetic construct
  source 1..21: mol_type = other RNA
  modified_base 1: mod_base = OTHER; note = 2'-deoxy-2'-fluoroadenosine-3'-phosphorothioate
  modified_base 2: mod_base = OTHER; note = 2'-O-methyluridine-3'-phosphorothioate
  modified_base 3: mod_base = OTHER; note = 2'-deoxy-2'-fluorouridine-3'-phosphate
  modified_base 4: mod_base = OTHER; note = 2'-O-methylguanosine-3'-phosphate
  modified_base 5: mod_base = OTHER; note = 2'-deoxy-2'-fluoroadenosine-3'-phosphate
  modified_base 6: mod_base = OTHER; note = 2'-O-methyluridine-3'-phosphate
  modified_base 7: mod_base = OTHER; note = 2'-deoxy-2'-fluoroguanosine-3'-phosphate
  modified_base 8: mod_base = OTHER; note = 2'-O-methyladenosine-3'-phosphate
  modified_base 9: mod_base = OTHER; note = 2'-deoxy-2'-fluoroguanosine-3'-phosphate
  modified_base 10: mod_base = OTHER; note = 2'-deoxy-2'-fluoroadenosine-3'-phosphate
  modified_base 11: mod_base = OTHER; note = 2'-deoxy-2'-fluorouridine-3'-phosphate
  modified_base 12: mod_base = OTHER; note = 2'-O-methylcytidine-3'-phosphate
  modified_base 13: mod_base = OTHER; note = 2'-deoxy-2'-fluorocytidine-3'-phosphate
  modified_base 14: mod_base = OTHER; note = 2'-O-methylguanosine-3'-phosphate
  modified_base 15: mod_base = OTHER; note = 2'-deoxy-2'-fluoroguanosine-3'-phosphate
  modified_base 16: mod_base = OTHER; note = 2'-O-methylguanosine-3'-phosphate
  modified_base 17: mod_base = OTHER; note = 2'-deoxy-2'-fluoroadenosine-3'-phosphate
  modified_base 18: mod_base = OTHER; note = 2'-O-methylcytidine-3'-phosphate
  modified_base 19: mod_base = OTHER; note = 2'-deoxy-2'-fluorouridine-3'-phosphate
  modified_base 20: mod_base = OTHER; note = 2'-O-methyluridine-3'-phosphate
  modified_base 21: mod_base = OTHER; note = 2'-deoxy-2'-fluoroguanosine-3'-phosphate ((2S,4R)-1-[29-[[2-(acetylamino)-2-deoxy-beta-D-galactopyra nosyl]oxy]-14,14-bis[[3-[[3-[[5-[[2-(acetylamino)-2-deoxy-b eta-D-galactopyranosyl]oxy]-1-oxopentyl]amino]propyl]amino] -3-oxopropoxy]methyl]-1,12,19,25-tetraoxo-16-oxa-13,20,24-t riazanonacos-1-yl]-4-hydroxy-2-pyrrolidinyl)methyl ester
attgatgagatccgggacttg

SEQ ID NO: 149 - RNA, 21 nt, synthetic construct
  source 1..21: mol_type = other RNA
  modified_base 1: mod_base = OTHER; note = 2'-deoxy-2'-fluorocytidine-3'-phosphorothioate
  modified_base 2: mod_base = OTHER; note = 2'-O-methyluridine-3'-phosphorothioate
  modified_base 3: mod_base = OTHER; note = 2'-deoxy-2'-fluoroguanosine-3'-phosphate
  modified_base 4: mod_base = OTHER; note = 2'-O-methyluridine-3'-phosphate
  modified_base 5: mod_base = OTHER; note = 2'-deoxy-2'-fluoroguanosine-3'-phosphate
  modified_base 6: mod_base = OTHER; note = 2'-O-methyladenosine-3'-phosphate
  modified_base 7: mod_base = OTHER; note = 2'-deoxy-2'-fluoroguanosine-3'-phosphate
  modified_base 8: mod_base = OTHER; note = 2'-O-methyladenosine-3'-phosphate
  modified_base 9: mod_base = OTHER; note = 2'-deoxy-2'-fluoroguanosine-3'-phosphate
  modified_base 10: mod_base = OTHER; note = 2'-deoxy-2'-fluoroadenosine-3'-phosphate
  modified_base 11: mod_base = OTHER; note = 2'-deoxy-2'-fluoroguanosine-3'-phosphate
  modified_base 12: mod_base = OTHER; note = 2'-O-methyladenosine-3'-phosphate
  modified_base 13: mod_base = OTHER; note = 2'-deoxy-2'-fluorouridine-3'-phosphate
  modified_base 14: mod_base = OTHER; note = 2'-O-methylguanosine-3'-phosphate
  modified_base 15: mod_base = OTHER; note = 2'-deoxy-2'-fluorocytidine-3'-phosphate
  modified_base 16: mod_base = OTHER; note = 2'-O-methyluridine-3'-phosphate
  modified_base 17: mod_base = OTHER; note = 2'-deoxy-2'-fluorocytidine-3'-phosphate
  modified_base 18: mod_base = OTHER; note = 2'-O-methyladenosine-3'-phosphate
  modified_base 19: mod_base = OTHER; note = 2'-deoxy-2'-fluoroadenosine-3'-phosphate
  modified_base 20: mod_base = OTHER; note = 2'-O-methyluridine-3'-phosphate
  modified_base 21: mod_base = OTHER; note = 2'-deoxy-2'-fluoroadenosine-3'-phosphate ((2S,4R)-1-[29-[[2-(acetylamino)-2-deoxy-beta-D-galactopyra nosyl]oxy]-14,14-bis[[3-[[3-[[5-[[2-(acetylamino)-2-deoxy-b eta-D-galactopyranosyl]oxy]-1-oxopentyl]amino]propyl]amino] -3-oxopropoxy]methyl]-1,12,19,25-tetraoxo-16-oxa-13,20,24-t riazanonacos-1-yl]-4-hydroxy-2-pyrrolidinyl)methyl ester
ctgtgagagagatgctcaata

SEQ ID NO: 150 - RNA, 21 nt, synthetic construct
  source 1..21: mol_type = other RNA
  modified_base 1: mod_base = OTHER; note = 2'-deoxy-2'-fluoroguanosine-3'-phosphorothioate
  modified_base 2: mod_base = OTHER; note = 2'-O-methyladenosine-3'-phosphorothioate
  modified_base 3: mod_base = OTHER; note = 2'-deoxy-2'-fluoroguanosine-3'-phosphate
  modified_base 4: mod_base = OTHER; note = 2'-O-methylcytidine-3'-phosphate
  modified_base 5: mod_base = OTHER; note = 2'-deoxy-2'-fluorocytidine-3'-phosphate
  modified_base 6: mod_base = OTHER; note = 2'-O-methyladenosine-3'-phosphate
  modified_base 7: mod_base = OTHER; note = 2'-deoxy-2'-fluoroadenosine-3'-phosphate
  modified_base 8: mod_base = OTHER; note = 2'-O-methyladenosine-3'-phosphate
  modified_base 9: mod_base = OTHER; note = 2'-deoxy-2'-fluoroadenosine-3'-phosphate
  modified_base 10: mod_base = OTHER; note = 2'-deoxy-2'-fluoroadenosine-3'-phosphate
  modified_base 11: mod_base = OTHER; note = 2'-deoxy-2'-fluoroguanosine-3'-phosphate
  modified_base 12: mod_base = OTHER; note = 2'-O-methyluridine-3'-phosphate
  modified_base 13: mod_base = OTHER; note = 2'-deoxy-2'-fluoroguanosine-3'-phosphate
  modified_base 14: mod_base = OTHER; note = 2'-O-methyluridine-3'-phosphate
  modified_base 15: mod_base = OTHER; note = 2'-deoxy-2'-fluorocytidine-3'-phosphate
  modified_base 16: mod_base = OTHER; note = 2'-O-methyluridine-3'-phosphate
  modified_base 17: mod_base = OTHER; note = 2'-deoxy-2'-fluoroadenosine-3'-phosphate
  modified_base 18: mod_base = OTHER; note = 2'-O-methylguanosine-3'-phosphate
  modified_base 19: mod_base = OTHER; note = 2'-deoxy-2'-fluorouridine-3'-phosphate
  modified_base 20: mod_base = OTHER; note = 2'-O-methylcytidine-3'-phosphate
  modified_base 21: mod_base = OTHER; note = 2'-deoxy-2'-fluoroadenosine-3'-phosphate ((2S,4R)-1-[29-[[2-(acetylamino)-2-deoxy-beta-D-galactopyra nosyl]oxy]-14,14-bis[[3-[[3-[[5-[[2-(acetylamino)-2-deoxy-b eta-D-galactopyranosyl]oxy]-1-oxopentyl]amino]propyl]amino] -3-oxopropoxy]methyl]-1,12,19,25-tetraoxo-16-oxa-13,20,24-t riazanonacos-1-yl]-4-hydroxy-2-pyrrolidinyl)methyl ester
gagccaaaaagtgtctagtca

SEQ ID NO: 151 - RNA, 21 nt, synthetic construct
  source 1..21: mol_type = other RNA
  modified_base 1: mod_base = OTHER; note = 2'-deoxy-2'-fluorouridine-3'-phosphorothioate
  modified_base 2: mod_base = OTHER; note = 2'-O-methylcytidine-3'-phosphorothioate
  modified_base 3: mod_base = OTHER; note = 2'-deoxy-2'-fluorocytidine-3'-phosphate
  modified_base 4: mod_base = OTHER; note = 2'-O-methyladenosine-3'-phosphate
  modified_base 5: mod_base = OTHER; note = 2'-deoxy-2'-fluoroadenosine-3'-phosphate
  modified_base 6: mod_base = OTHER; note = 2'-O-methylguanosine-3'-phosphate
  modified_base 7: mod_base = OTHER; note = 2'-deoxy-2'-fluoroadenosine-3'-phosphate
  modified_base 8: mod_base = OTHER; note = 2'-O-methyluridine-3'-phosphate
  modified_base 9: mod_base = OTHER; note = 2'-deoxy-2'-fluoroguanosine-3'-phosphate
  modified_base 10: mod_base = OTHER; note = 2'-deoxy-2'-fluoroadenosine-3'-phosphate
  modified_base 11: mod_base = OTHER; note = 2'-deoxy-2'-fluoroguanosine-3'-phosphate
  modified_base 12: mod_base = OTHER; note = 2'-O-methylguanosine-3'-phosphate
  modified_base 13: mod_base = OTHER; note = 2'-deoxy-2'-fluoroadenosine-3'-phosphate
  modified_base 14: mod_base = OTHER; note = 2'-O-methyluridine-3'-phosphate
  modified_base 15: mod_base = OTHER; note = 2'-deoxy-2'-fluorouridine-3'-phosphate
  modified_base 16: mod_base = OTHER; note = 2'-O-methyluridine-3'-phosphate
  modified_base 17: mod_base = OTHER; note = 2'-deoxy-2'-fluoroguanosine-3'-phosphate
  modified_base 18: mod_base = OTHER; note = 2'-O-methylguanosine-3'-phosphate
  modified_base 19: mod_base = OTHER; note = 2'-deoxy-2'-fluoroguanosine-3'-phosphate
  modified_base 20: mod_base = OTHER; note = 2'-O-methyluridine-3'-phosphate
  modified_base 21: mod_base = OTHER; note = 2'-deoxy-2'-fluorouridine-3'-phosphate ((2S,4R)-1-[29-[[2-(acetylamino)-2-deoxy-beta-D-galactopyra nosyl]oxy]-14,14-bis[[3-[[3-[[5-[[2-(acetylamino)-2-deoxy-b eta-D-galactopyranosyl]oxy]-1-oxopentyl]amino]propyl]amino] -3-oxopropoxy]methyl]-1,12,19,25-tetraoxo-16-oxa-13,20,24-t riazanonacos-1-yl]-4-hydroxy-2-pyrrolidinyl)methyl ester
tccaagatgaggatttgggtt

SEQ ID NO: 152 - RNA, 21 nt, synthetic construct
  source 1..21: mol_type = other RNA
  modified_base 1: mod_base = OTHER; note = 2'-deoxy-2'-fluorocytidine-3'-phosphorothioate
  modified_base 2: mod_base = OTHER; note = 2'-O-methylcytidine-3'-phosphorothioate
  modified_base 3: mod_base = OTHER; note = 2'-deoxy-2'-fluorocytidine-3'-phosphate
  modified_base 4: mod_base = OTHER; note = 2'-O-methyluridine-3'-phosphate
  modified_base 5: mod_base = OTHER; note = 2'-deoxy-2'-fluorouridine-3'-phosphate
  modified_base 6: mod_base = OTHER; note = 2'-O-methylguanosine-3'-phosphate
  modified_base 7: mod_base = OTHER; note = 2'-deoxy-2'-fluoroadenosine-3'-phosphate
  modified_base 8: mod_base = OTHER; note = 2'-O-methyluridine-3'-phosphate
  modified_base 9: mod_base = OTHER; note = 2'-deoxy-2'-fluoroadenosine-3'-phosphate
  modified_base 10: mod_base = OTHER; note = 2'-deoxy-2'-fluoroguanosine-3'-phosphate
  modified_base 11: mod_base = OTHER; note = 2'-deoxy-2'-fluorouridine-3'-phosphate
  modified_base 12: mod_base = OTHER; note = 2'-O-methyluridine-3'-phosphate
  modified_base 13: mod_base = OTHER; note = 2'-deoxy-2'-fluorocytidine-3'-phosphate
  modified_base 14: mod_base = OTHER; note = 2'-O-methyladenosine-3'-phosphate
  modified_base 15: mod_base = OTHER; note = 2'-deoxy-2'-fluorocytidine-3'-phosphate
  modified_base 16: mod_base = OTHER; note = 2'-O-methyladenosine-3'-phosphate
  modified_base 17: mod_base = OTHER; note = 2'-deoxy-2'-fluoroadenosine-3'-phosphate
  modified_base 18: mod_base = OTHER; note = 2'-O-methylguanosine-3'-phosphate
  modified_base 19: mod_base = OTHER; note = 2'-deoxy-2'-fluoroadenosine-3'-phosphate
  modified_base 20: mod_base = OTHER; note = 2'-O-methylguanosine-3'-phosphate
  modified_base 21: mod_base = OTHER; note = 2'-deoxy-2'-fluoroadenosine-3'-phosphate ((2S,4R)-1-[29-[[2-(acetylamino)-2-deoxy-beta-D-galactopyra nosyl]oxy]-14,14-bis[[3-[[3-[[5-[[2-(acetylamino)-2-deoxy-b eta-D-galactopyranosyl]oxy]-1-oxopentyl]amino]propyl]amino] -3-oxopropoxy]methyl]-1,12,19,25-tetraoxo-16-oxa-13,20,24-t riazanonacos-1-yl]-4-hydroxy-2-pyrrolidinyl)methyl ester
cccttgatagttcacaagaga

SEQ ID NO: 153 - RNA, 21 nt, synthetic construct
  source 1..21: mol_type = other RNA
  modified_base 1: mod_base = OTHER; note = 2'-deoxy-2'-fluorocytidine-3'-phosphorothioate
  modified_base 2: mod_base = OTHER; note = 2'-O-methyladenosine-3'-phosphorothioate
  modified_base 3: mod_base = OTHER; note = 2'-deoxy-2'-fluoroadenosine-3'-phosphate
  modified_base 4: mod_base = OTHER; note = 2'-O-methyladenosine-3'-phosphate
  modified_base 5: mod_base = OTHER; note = 2'-deoxy-2'-fluoroguanosine-3'-phosphate
  modified_base 6: mod_base = OTHER; note = 2'-O-methyluridine-3'-phosphate
  modified_base 7: mod_base = OTHER; note = 2'-deoxy-2'-fluorocytidine-3'-phosphate
  modified_base 8: mod_base = OTHER; note = 2'-O-methyladenosine-3'-phosphate
  modified_base 9: mod_base = OTHER; note = 2'-deoxy-2'-fluoroadenosine-3'-phosphate
  modified_base 10: mod_base = OTHER; note = 2'-deoxy-2'-fluoroguanosine-3'-phosphate
  modified_base 11: mod_base = OTHER; note = 2'-deoxy-2'-fluoroguanosine-3'-phosphate
  modified_base 12: mod_base = OTHER; note = 2'-O-methyladenosine-3'-phosphate
  modified_base 13: mod_base = OTHER; note = 2'-deoxy-2'-fluorouridine-3'-phosphate
  modified_base 14: mod_base = OTHER; note = 2'-O-methyladenosine-3'-phosphate
  modified_base 15: mod_base = OTHER; note = 2'-deoxy-2'-fluorouridine-3'-phosphate
  modified_base 16: mod_base = OTHER; note = 2'-O-methylguanosine-3'-phosphate
  modified_base 17: mod_base = OTHER; note = 2'-deoxy-2'-fluoroguanosine-3'-phosphate
  modified_base 18: mod_base = OTHER; note = 2'-O-methyladenosine-3'-phosphate
  modified_base 19: mod_base = OTHER; note = 2'-deoxy-2'-fluoroadenosine-3'-phosphate
  modified_base 20: mod_base = OTHER; note = 2'-O-methyladenosine-3'-phosphate
  modified_base 21: mod_base = OTHER; note = 2'-deoxy-2'-fluoroadenosine-3'-phosphate ((2S,4R)-1-[29-[[2-(acetylamino)-2-deoxy-beta-D-galactopyra nosyl]oxy]-14,14-bis[[3-[[3-[[5-[[2-(acetylamino)-2-deoxy-b eta-D-galactopyranosyl]oxy]-1-oxopentyl]amino]propyl]amino] -3-oxopropoxy]methyl]-1,12,19,25-tetraoxo-16-oxa-13,20,24-t riazanonacos-1-yl]-4-hydroxy-2-pyrrolidinyl)methyl ester
caaagtcaaggatatggaaaa

SEQ ID NO: 154 - RNA, 21 nt, synthetic construct
  source 1..21: mol_type = other RNA
  modified_base 1: mod_base = OTHER; note = 2'-deoxy-2'-fluorouridine-3'-phosphorothioate
  modified_base 2: mod_base = OTHER; note = 2'-O-methyladenosine-3'-phosphorothioate
  modified_base 3: mod_base = OTHER; note = 2'-deoxy-2'-fluoroguanosine-3'-phosphate
  modified_base 4: mod_base = OTHER; note = 2'-O-methyluridine-3'-phosphate
  modified_base 5: mod_base = OTHER; note = 2'-deoxy-2'-fluorouridine-3'-phosphate
  modified_base 6: mod_base = OTHER; note = 2'-O-methylcytidine-3'-phosphate
  modified_base 7: mod_base = OTHER; note = 2'-deoxy-2'-fluoroadenosine-3'-phosphate
  modified_base 8: mod_base = OTHER; note = 2'-O-methylcytidine-3'-phosphate
  modified_base 9: mod_base = OTHER; note = 2'-deoxy-2'-fluoroadenosine-3'-phosphate
  modified_base 10: mod_base = OTHER; note = 2'-deoxy-2'-fluoroadenosine-3'-phosphate
  modified_base 11: mod_base = OTHER; note = 2'-deoxy-2'-fluoroguanosine-3'-phosphate
  modified_base 12: mod_base = OTHER; note = 2'-O-methyladenosine-3'-phosphate
  modified_base 13: mod_base = OTHER; note = 2'-deoxy-2'-fluoroguanosine-3'-phosphate
  modified_base 14: mod_base = OTHER; note = 2'-O-methyladenosine-3'-phosphate
  modified_base 15: mod_base = OTHER; note = 2'-deoxy-2'-fluoroadenosine-3'-phosphate
  modified_base 16: mod_base = OTHER; note = 2'-O-methylguanosine-3'-phosphate
  modified_base 17: mod_base = OTHER; note = 2'-deoxy-2'-fluorouridine-3'-phosphate
  modified_base 18: mod_base = OTHER; note = 2'-O-methylcytidine-3'-phosphate
  modified_base 19: mod_base = OTHER; note = 2'-deoxy-2'-fluoroguanosine-3'-phosphate
  modified_base 20: mod_base = OTHER; note = 2'-O-methyluridine-3'-phosphate
  modified_base 21: mod_base = OTHER; note = 2'-deoxy-2'-fluorouridine-3'-phosphate ((2S,4R)-1-[29-[[2-(acetylamino)-2-deoxy-beta-D-galactopyra nosyl]oxy]-14,14-bis[[3-[[3-[[5-[[2-(acetylamino)-2-deoxy-b eta-D-galactopyranosyl]oxy]-1-oxopentyl]amino]propyl]amino] -3-oxopropoxy]methyl]-1,12,19,25-tetraoxo-16-oxa-13,20,24-t riazanonacos-1-yl]-4-hydroxy-2-pyrrolidinyl)methyl ester
tagttcacaagagaagtcgtt

SEQ ID NO: 155 - RNA, 21 nt, synthetic construct
  source 1..21: mol_type = other RNA
  modified_base 1: mod_base = OTHER; note = 2'-deoxy-2'-fluoroguanosine-3'-phosphorothioate
  modified_base 2: mod_base = OTHER; note = 2'-O-methylguanosine-3'-phosphorothioate
  modified_base 3: mod_base = OTHER; note = 2'-deoxy-2'-fluorocytidine-3'-phosphate
  modified_base 4: mod_base = OTHER; note = 2'-O-methylcytidine-3'-phosphate
  modified_base 5: mod_base = OTHER; note = 2'-deoxy-2'-fluorocytidine-3'-phosphate
  modified_base 6: mod_base = OTHER; note = 2'-O-methylcytidine-3'-phosphate
  modified_base 7: mod_base = OTHER; note = 2'-deoxy-2'-fluorouridine-3'-phosphate
  modified_base 8: mod_base = OTHER; note = 2'-O-methyluridine-3'-phosphate
  modified_base 9: mod_base = OTHER; note = 2'-deoxy-2'-fluoroguanosine-3'-phosphate
  modified_base 10: mod_base = OTHER; note = 2'-deoxy-2'-fluoroadenosine-3'-phosphate
  modified_base 11: mod_base = OTHER; note = 2'-deoxy-2'-fluorouridine-3'-phosphate
  modified_base 12: mod_base = OTHER; note = 2'-O-methyladenosine-3'-phosphate
  modified_base 13: mod_base = OTHER; note = 2'-deoxy-2'-fluoroguanosine-3'-phosphate
  modified_base 14: mod_base = OTHER; note = 2'-O-methyluridine-3'-phosphate
  modified_base 15: mod_base = OTHER; note = 2'-deoxy-2'-fluorouridine-3'-phosphate
  modified_base 16: mod_base = OTHER; note = 2'-O-methylcytidine-3'-phosphate
  modified_base 17: mod_base = OTHER; note = 2'-deoxy-2'-fluoroadenosine-3'-phosphate
  modified_base 18: mod_base = OTHER; note = 2'-O-methylcytidine-3'-phosphate
  modified_base 19: mod_base = OTHER; note = 2'-deoxy-2'-fluoroadenosine-3'-phosphate
  modified_base 20: mod_base = OTHER; note = 2'-O-methyladenosine-3'-phosphate
  modified_base 21: mod_base = OTHER; note = 2'-deoxy-2'-fluoroguanosine-3'-phosphate ((2S,4R)-1-[29-[[2-(acetylamino)-2-deoxy-beta-D-galactopyra nosyl]oxy]-14,14-bis[[3-[[3-[[5-[[2-(acetylamino)-2-deoxy-b eta-D-galactopyranosyl]oxy]-1-oxopentyl]amino]propyl]amino] -3-oxopropoxy]methyl]-1,12,19,25-tetraoxo-16-oxa-13,20,24-t riazanonacos-1-yl]-4-hydroxy-2-pyrrolidinyl)methyl ester
ggccccttgatagttcacaag

SEQ ID NO: 156 - RNA, 21 nt, synthetic construct
  source 1..21: mol_type = other RNA
  modified_base 1: mod_base = OTHER; note = 2'-deoxy-2'-fluorouridine-3'-phosphorothioate
  modified_base 2: mod_base = OTHER; note = 2'-O-methylguanosine-3'-phosphorothioate
  modified_base 3: mod_base = OTHER; note = 2'-deoxy-2'-fluoroguanosine-3'-phosphate
  modified_base 4: mod_base = OTHER; note = 2'-O-methyluridine-3'-phosphate
  modified_base 5: mod_base = OTHER; note = 2'-deoxy-2'-fluoroguanosine-3'-phosphate
  modified_base 6: mod_base = OTHER; note = 2'-O-methylcytidine-3'-phosphate
  modified_base 7: mod_base = OTHER; note = 2'-deoxy-2'-fluorouridine-3'-phosphate
  modified_base 8: mod_base = OTHER; note = 2'-O-methyladenosine-3'-phosphate
  modified_base 9: mod_base = OTHER; note = 2'-deoxy-2'-fluoroguanosine-3'-phosphate
  modified_base 10: mod_base = OTHER; note = 2'-deoxy-2'-fluoroadenosine-3'-phosphate
  modified_base 11: mod_base = OTHER; note = 2'-deoxy-2'-fluorouridine-3'-phosphate
  modified_base 12: mod_base = OTHER; note = 2'-O-methylguanosine-3'-phosphate
  modified_base 13: mod_base = OTHER; note = 2'-deoxy-2'-fluoroguanosine-3'-phosphate
  modified_base 14: mod_base = OTHER; note = 2'-O-methyladenosine-3'-phosphate
  modified_base 15: mod_base = OTHER; note = 2'-deoxy-2'-fluorouridine-3'-phosphate
  modified_base 16: mod_base = OTHER; note = 2'-O-methylcytidine-3'-phosphate
  modified_base 17: mod_base = OTHER; note = 2'-deoxy-2'-fluoroadenosine-3'-phosphate
  modified_base 18: mod_base = OTHER; note = 2'-O-methylguanosine-3'-phosphate
  modified_base 19: mod_base = OTHER; note = 2'-deoxy-2'-fluoroadenosine-3'-phosphate
  modified_base 20: mod_base = OTHER; note = 2'-O-methylcytidine-3'-phosphate
  modified_base 21: mod_base = OTHER; note = 2'-deoxy-2'-fluoroadenosine-3'-phosphate ((2S,4R)-1-[29-[[2-(acetylamino)-2-deoxy-beta-D-galactopyra nosyl]oxy]-14,14-bis[[3-[[3-[[5-[[2-(acetylamino)-2-deoxy-b eta-D-galactopyranosyl]oxy]-1-oxopentyl]amino]propyl]amino] -3-oxopropoxy]methyl]-1,12,19,25-tetraoxo-16-oxa-13,20,24-t riazanonacos-1-yl]-4-hydroxy-2-pyrrolidinyl)methyl ester
tggtgctagatggatcagaca

SEQ ID NO: 157 - RNA, 21 nt, synthetic construct
  source 1..21: mol_type = other RNA
  modified_base 1: mod_base = OTHER; note = 2'-deoxy-2'-fluoroguanosine-3'-phosphorothioate
  modified_base 2: mod_base = OTHER; note = 2'-O-methylcytidine-3'-phosphorothioate
  modified_base 3: mod_base = OTHER; note = 2'-deoxy-2'-fluorouridine-3'-phosphate
  modified_base 4: mod_base = OTHER; note = 2'-O-methyladenosine-3'-phosphate
  modified_base 5: mod_base = OTHER; note = 2'-deoxy-2'-fluoroguanosine-3'-phosphate
  modified_base 6: mod_base = OTHER; note = 2'-O-methyladenosine-3'-phosphate
  modified_base 7: mod_base = OTHER; note = 2'-deoxy-2'-fluorouridine-3'-phosphate
  modified_base 8: mod_base = OTHER; note = 2'-O-methylguanosine-3'-phosphate
  modified_base 9: mod_base = OTHER; note = 2'-deoxy-2'-fluoroguanosine-3'-phosphate
  modified_base 10: mod_base = OTHER; note = 2'-deoxy-2'-fluoroadenosine-3'-phosphate
  modified_base 11: mod_base = OTHER; note = 2'-deoxy-2'-fluorouridine-3'-phosphate
  modified_base 12: mod_base = OTHER; note = 2'-O-methylcytidine-3'-phosphate
  modified_base 13: mod_base = OTHER; note = 2'-deoxy-2'-fluoroadenosine-3'-phosphate
  modified_base 14: mod_base = OTHER; note = 2'-O-methylguanosine-3'-phosphate
  modified_base 15: mod_base = OTHER; note = 2'-deoxy-2'-fluoroadenosine-3'-phosphate
  modified_base 16: mod_base = OTHER; note = 2'-O-methylcytidine-3'-phosphate
  modified_base 17: mod_base = OTHER; note = 2'-deoxy-2'-fluoroadenosine-3'-phosphate
  modified_base 18: mod_base = OTHER; note = 2'-O-methylguanosine-3'-phosphate
  modified_base 19: mod_base = OTHER; note = 2'-deoxy-2'-fluorocytidine-3'-phosphate
  modified_base 20: mod_base = OTHER; note = 2'-O-methyladenosine-3'-phosphate
  modified_base 21: mod_base = OTHER; note = 2'-deoxy-2'-fluorouridine-3'-phosphate ((2S,4R)-1-[29-[[2-(acetylamino)-2-deoxy-beta-D-galactopyra nosyl]oxy]-14,14-bis[[3-[[3-[[5-[[2-(acetylamino)-2-deoxy-b eta-D-galactopyranosyl]oxy]-1-oxopentyl]amino]propyl]amino] -3-oxopropoxy]methyl]-1,12,19,25-tetraoxo-16-oxa-13,20,24-t riazanonacos-1-yl]-4-hydroxy-2-pyrrolidinyl)methyl ester
gctagatggatcagacagcat

SEQ ID NO: 158 - RNA, 21 nt, synthetic construct
  source 1..21: mol_type = other RNA
  modified_base 1: mod_base = OTHER; note = 2'-deoxy-2'-fluorouridine-3'-phosphorothioate
  modified_base 2: mod_base = OTHER; note = 2'-O-methyladenosine-3'-phosphorothioate
  modified_base 3: mod_base = OTHER; note = 2'-deoxy-2'-fluorocytidine-3'-phosphate
  modified_base 4: mod_base = OTHER; note = 2'-O-methylcytidine-3'-phosphate
  modified_base 5: mod_base = OTHER; note = 2'-deoxy-2'-fluorouridine-3'-phosphate
  modified_base 6: mod_base = OTHER; note = 2'-O-methylguanosine-3'-phosphate
  modified_base 7: mod_base = OTHER; note = 2'-deoxy-2'-fluoroguanosine-3'-phosphate
  modified_base 8: mod_base = OTHER; note = 2'-O-methyluridine-3'-phosphate
  modified_base 9: mod_base = OTHER; note = 2'-deoxy-2'-fluoroguanosine-3'-phosphate
  modified_base 10: mod_base = OTHER; note = 2'-deoxy-2'-fluorocytidine-3'-phosphate
  modified_base 11: mod_base = OTHER; note = 2'-deoxy-2'-fluorouridine-3'-phosphate
  modified_base 12: mod_base = OTHER; note = 2'-O-methyladenosine-3'-phosphate
  modified_base 13: mod_base = OTHER; note = 2'-deoxy-2'-fluoroguanosine-3'-phosphate
  modified_base 14: mod_base = OTHER; note = 2'-O-methyladenosine-3'-phosphate
  modified_base 15: mod_base = OTHER; note = 2'-deoxy-2'-fluorouridine-3'-phosphate
  modified_base 16: mod_base = OTHER; note = 2'-O-methylguanosine-3'-phosphate
  modified_base 17: mod_base = OTHER; note = 2'-deoxy-2'-fluoroguanosine-3'-phosphate
  modified_base 18: mod_base = OTHER; note = 2'-O-methyladenosine-3'-phosphate
  modified_base 19: mod_base = OTHER; note = 2'-deoxy-2'-fluorouridine-3'-phosphate
  modified_base 20: mod_base = OTHER; note = 2'-O-methylcytidine-3'-phosphate
  modified_base 21: mod_base = OTHER; note = 2'-deoxy-2'-fluoroadenosine-3'-phosphate ((2S,4R)-1-[29-[[2-(acetylamino)-2-deoxy-beta-D-galactopyra nosyl]oxy]-14,14-bis[[3-[[3-[[5-[[2-(acetylamino)-2-deoxy-b eta-D-galactopyranosyl]oxy]-1-oxopentyl]amino]propyl]amino] -3-oxopropoxy]methyl]-1,12,19,25-tetraoxo-16-oxa-13,20,24-t riazanonacos-1-yl]-4-hydroxy-2-pyrrolidinyl)methyl ester
tacctggtgctagatggatca

SEQ ID NO: 159 - RNA, 21 nt, synthetic construct
  source 1..21: mol_type = other RNA
  modified_base 1: mod_base = OTHER; note = 2'-deoxy-2'-fluoroguanosine-3'-phosphorothioate
  modified_base 2: mod_base = OTHER; note = 2'-O-methylguanosine-3'-phosphorothioate
  modified_base 3: mod_base = OTHER; note = 2'-deoxy-2'-fluorouridine-3'-phosphate
  modified_base 4: mod_base = OTHER; note = 2'-O-methylguanosine-3'-phosphate
  modified_base 5: mod_base = OTHER; note = 2'-deoxy-2'-fluorocytidine-3'-phosphate
  modified_base 6: mod_base = OTHER; note = 2'-O-methyluridine-3'-phosphate
  modified_base 7: mod_base = OTHER; note = 2'-deoxy-2'-fluoroadenosine-3'-phosphate
  modified_base 8: mod_base = OTHER; note = 2'-O-methylguanosine-3'-phosphate
  modified_base 9: mod_base = OTHER; note = 2'-deoxy-2'-fluoroadenosine-3'-phosphate
  modified_base 10: mod_base = OTHER; note = 2'-deoxy-2'-fluorouridine-3'-phosphate
  modified_base 11: mod_base = OTHER; note = 2'-deoxy-2'-fluoroguanosine-3'-phosphate
  modified_base 12: mod_base = OTHER; note = 2'-O-methylguanosine-3'-phosphate
  modified_base 13: mod_base = OTHER; note = 2'-deoxy-2'-fluoroadenosine-3'-phosphate
  modified_base 14: mod_base = OTHER; note = 2'-O-methyluridine-3'-phosphate
  modified_base 15: mod_base = OTHER; note = 2'-deoxy-2'-fluorocytidine-3'-phosphate
  modified_base 16: mod_base = OTHER; note = 2'-O-methyladenosine-3'-phosphate
  modified_base 17: mod_base = OTHER; note = 2'-deoxy-2'-fluoroguanosine-3'-phosphate
  modified_base 18: mod_base = OTHER; note = 2'-O-methyladenosine-3'-phosphate
  modified_base 19: mod_base = OTHER; note = 2'-deoxy-2'-fluorocytidine-3'-phosphate
  modified_base 20: mod_base = OTHER; note = 2'-O-methyladenosine-3'-phosphate
  modified_base 21: mod_base = OTHER; note = 2'-deoxy-2'-fluoroadenosine-3'-phosphate ((2S,4R)-1-[29-[[2-(acetylamino)-2-deoxy-beta-D-galactopyra nosyl]oxy]-14,14-bis[[3-[[3-[[5-[[2-(acetylamino)-2-deoxy-b eta-D-galactopyranosyl]oxy]-1-oxopentyl]amino]propyl]amino] -3-oxopropoxy]methyl]-1,12,19,25-tetraoxo-16-oxa-13,20,24-t riazanonacos-1-yl]-4-hydroxy-2-pyrrolidinyl)methyl ester
ggtgctagatggatcagacaa

SEQ ID NO: 160 - RNA, 21 nt, synthetic construct
  source 1..21: mol_type = other RNA
  modified_base 1: mod_base = OTHER; note = 2'-deoxy-2'-fluorouridine-3'-phosphorothioate
  modified_base 2: mod_base = OTHER; note = 2'-O-methylcytidine-3'-phosphorothioate
  modified_base 3: mod_base = OTHER; note = 2'-deoxy-2'-fluorouridine-3'-phosphate
  modified_base 4: mod_base = OTHER; note = 2'-O-methylguanosine-3'-phosphate
  modified_base 5: mod_base = OTHER; note = 2'-deoxy-2'-fluoroadenosine-3'-phosphate
  modified_base 6: mod_base = OTHER; note = 2'-O-methylguanosine-3'-phosphate
  modified_base 7: mod_base = OTHER; note = 2'-deoxy-2'-fluorouridine-3'-phosphate
  modified_base 8: mod_base = OTHER; note = 2'-O-methylcytidine-3'-phosphate
  modified_base 9: mod_base = OTHER; note = 2'-deoxy-2'-fluorouridine-3'-phosphate
  modified_base 10: mod_base = OTHER; note = 2'-deoxy-2'-fluorocytidine-3'-phosphate
  modified_base 11: mod_base = OTHER; note = 2'-deoxy-2'-fluorouridine-3'-phosphate
  modified_base 12: mod_base = OTHER; note = 2'-O-methylguanosine-3'-phosphate
  modified_base 13: mod_base = OTHER; note = 2'-deoxy-2'-fluorouridine-3'-phosphate
  modified_base 14: mod_base = OTHER; note = 2'-O-methylguanosine-3'-phosphate
  modified_base 15: mod_base = OTHER; note = 2'-deoxy-2'-fluoroguanosine-3'-phosphate
  modified_base 16: mod_base = OTHER; note = 2'-O-methylcytidine-3'-phosphate
  modified_base 17: mod_base = OTHER; note = 2'-deoxy-2'-fluoroadenosine-3'-phosphate
  modified_base 18: mod_base = OTHER; note = 2'-O-methyluridine-3'-phosphate
  modified_base 19: mod_base = OTHER; note = 2'-deoxy-2'-fluoroguanosine-3'-phosphate
  modified_base 20: mod_base = OTHER; note = 2'-O-methylguanosine-3'-phosphate
  modified_base 21: mod_base = OTHER; note = 2'-deoxy-2'-fluorouridine-3'-phosphate ((2S,4R)-1-[29-[[2-(acetylamino)-2-deoxy-beta-D-galactopyra nosyl]oxy]-14,14-bis[[3-[[3-[[5-[[2-(acetylamino)-2-deoxy-b eta-D-galactopyranosyl]oxy]-1-oxopentyl]amino]propyl]amino] -3-oxopropoxy]methyl]-1,12,19,25-tetraoxo-16-oxa-13,20,24-t riazanonacos-1-yl]-4-hydroxy-2-pyrrolidinyl)methyl ester
tctgagtctctgtggcatggt

SEQ ID NO: 161 - RNA, 21 nt, synthetic construct
  source 1..21: mol_type = other RNA
  modified_base 1: mod_base = OTHER; note = 2'-deoxy-2'-fluoroguanosine-3'-phosphorothioate
  modified_base 2: mod_base = OTHER; note = 2'-O-methyluridine-3'-phosphorothioate
  modified_base 3: mod_base = OTHER; note = 2'-deoxy-2'-fluoroguanosine-3'-phosphate
  modified_base 4: mod_base = OTHER; note = 2'-O-methylcytidine-3'-phosphate
  modified_base 5: mod_base = OTHER; note = 2'-deoxy-2'-fluorouridine-3'-phosphate
  modified_base 6: mod_base = OTHER; note = 2'-O-methyladenosine-3'-phosphate
  modified_base 7: mod_base = OTHER; note = 2'-deoxy-2'-fluoroguanosine-3'-phosphate
  modified_base 8: mod_base = OTHER; note = 2'-O-methyladenosine-3'-phosphate
  modified_base 9: mod_base = OTHER; note = 2'-deoxy-2'-fluorouridine-3'-phosphate
  modified_base 10: mod_base = OTHER; note = 2'-deoxy-2'-fluoroguanosine-3'-phosphate
  modified_base 11: mod_base = OTHER; note = 2'-deoxy-2'-fluoroguanosine-3'-phosphate
  modified_base 12: mod_base = OTHER; note = 2'-O-methyladenosine-3'-phosphate
  modified_base 13: mod_base = OTHER; note = 2'-deoxy-2'-fluorouridine-3'-phosphate
  modified_base 14: mod_base = OTHER; note = 2'-O-methylcytidine-3'-phosphate
  modified_base 15: mod_base = OTHER; note = 2'-deoxy-2'-fluoroadenosine-3'-phosphate
  modified_base 16: mod_base = OTHER; note = 2'-O-methylguanosine-3'-phosphate
  modified_base 17: mod_base = OTHER; note = 2'-deoxy-2'-fluoroadenosine-3'-phosphate
  modified_base 18: mod_base = OTHER; note = 2'-O-methylcytidine-3'-phosphate
  modified_base 19: mod_base = OTHER; note = 2'-deoxy-2'-fluoroadenosine-3'-phosphate
  modified_base 20: mod_base = OTHER; note = 2'-O-methylguanosine-3'-phosphate
  modified_base 21: mod_base = OTHER; note = 2'-deoxy-2'-fluoroadenosine-3'-phosphate ((2S,4R)-1-[29-[[2-(acetylamino)-2-deoxy-beta-D-galactopyra nosyl]oxy]-14,14-bis[[3-[[3-[[5-[[2-(acetylamino)-2-deoxy-b eta-D-galactopyranosyl]oxy]-1-oxopentyl]amino]propyl]amino] -3-oxopropoxy]methyl]-1,12,19,25-tetraoxo-16-oxa-13,20,24-t riazanonacos-1-yl]-4-hydroxy-2-pyrrolidinyl)methyl ester
gtgctagatggatcagacaga

SEQ ID NO: 162 - RNA, 21 nt, synthetic construct
  source 1..21: mol_type = other RNA
  modified_base 1: mod_base = OTHER; note = 2'-deoxy-2'-fluorocytidine-3'-phosphorothioate
  modified_base 2: mod_base = OTHER; note = 2'-O-methyluridine-3'-phosphorothioate
  modified_base 3: mod_base = OTHER; note = 2'-deoxy-2'-fluoroadenosine-3'-phosphate
  modified_base 4: mod_base = OTHER; note = 2'-O-methylcytidine-3'-phosphate
  modified_base 5: mod_base = OTHER; note = 2'-deoxy-2'-fluorocytidine-3'-phosphate
  modified_base 6: mod_base = OTHER; note = 2'-O-methyluridine-3'-phosphate
  modified_base 7: mod_base = OTHER; note = 2'-deoxy-2'-fluoroguanosine-3'-phosphate
  modified_base 8: mod_base = OTHER; note = 2'-O-methylguanosine-3'-phosphate
  modified_base 9: mod_base = OTHER; note = 2'-deoxy-2'-fluorouridine-3'-phosphate
  modified_base 10: mod_base = OTHER; note = 2'-deoxy-2'-fluoroguanosine-3'-phosphate
  modified_base 11: mod_base = OTHER; note = 2'-deoxy-2'-fluorocytidine-3'-phosphate
  modified_base 12: mod_base = OTHER; note = 2'-O-methyluridine-3'-phosphate
  modified_base 13: mod_base = OTHER; note = 2'-deoxy-2'-fluoroadenosine-3'-phosphate
  modified_base 14: mod_base = OTHER; note = 2'-O-methylguanosine-3'-phosphate
  modified_base 15: mod_base = OTHER; note = 2'-deoxy-2'-fluoroadenosine-3'-phosphate
  modified_base 16: mod_base = OTHER; note = 2'-O-methyluridine-3'-phosphate
  modified_base 17: mod_base = OTHER; note = 2'-deoxy-2'-fluoroguanosine-3'-phosphate
  modified_base 18: mod_base = OTHER; note = 2'-O-methylguanosine-3'-phosphate
  modified_base 19: mod_base = OTHER; note = 2'-deoxy-2'-fluoroadenosine-3'-phosphate
  modified_base 20: mod_base = OTHER; note = 2'-O-methyluridine-3'-phosphate
  modified_base 21: mod_base = OTHER; note = 2'-deoxy-2'-fluoroadenosine-3'-phosphate ((2S,4R)-1-[29-[[2-(acetylamino)-2-deoxy-beta-D-galactopyra nosyl]oxy]-14,14-bis[[3-[[3-[[5-[[2-(acetylamino)-2-deoxy-b eta-D-galactopyranosyl]oxy]-1-oxopentyl]amino]propyl]amino] -3-oxopropoxy]methyl]-1,12,19,25-tetraoxo-16-oxa-13,20,24-t riazanonacos-1-yl]-4-hydroxy-2-pyrrolidinyl)methyl ester
ctacctggtgctagatggata

SEQ ID NO: 163 - RNA, 21 nt, synthetic construct
  source 1..21: mol_type = other RNA
  modified_base 1: mod_base = OTHER; note = 2'-deoxy-2'-fluoroadenosine-3'-phosphorothioate
  modified_base 2: mod_base = OTHER; note = 2'-O-methylcytidine-3'-phosphorothioate
  modified_base 3: mod_base = OTHER; note = 2'-deoxy-2'-fluorocytidine-3'-phosphate
  modified_base 4: mod_base = OTHER; note = 2'-O-methyluridine-3'-phosphate
  modified_base 5: mod_base = OTHER; note = 2'-deoxy-2'-fluoroguanosine-3'-phosphate
  modified_base 6: mod_base = OTHER; note = 2'-O-methylguanosine-3'-phosphate
  modified_base 7: mod_base = OTHER; note = 2'-deoxy-2'-fluorouridine-3'-phosphate
  modified_base 8: mod_base = OTHER; note = 2'-O-methylguanosine-3'-phosphate
  modified_base 9: mod_base = OTHER; note = 2'-deoxy-2'-fluorocytidine-3'-phosphate
  modified_base 10: mod_base = OTHER; note = 2'-deoxy-2'-fluorouridine-3'-phosphate
  modified_base 11: mod_base = OTHER; note = 2'-deoxy-2'-fluoroadenosine-3'-phosphate
  modified_base 12: mod_base = OTHER; note = 2'-O-methylguanosine-3'-phosphate
  modified_base 13: mod_base = OTHER; note = 2'-deoxy-2'-fluoroadenosine-3'-phosphate
  modified_base 14: mod_base = OTHER; note = 2'-O-methyluridine-3'-phosphate
  modified_base 15: mod_base = OTHER; note = 2'-deoxy-2'-fluoroguanosine-3'-phosphate
  modified_base 16: mod_base = OTHER; note = 2'-O-methylguanosine-3'-phosphate
  modified_base 17: mod_base = OTHER; note = 2'-deoxy-2'-fluoroadenosine-3'-phosphate
  modified_base 18: mod_base = OTHER; note = 2'-O-methyluridine-3'-phosphate
  modified_base 19: mod_base = OTHER; note = 2'-deoxy-2'-fluorocytidine-3'-phosphate
  modified_base 20: mod_base = OTHER; note = 2'-O-methyladenosine-3'-phosphate
  modified_base 21: mod_base = OTHER; note = 2'-deoxy-2'-fluoroadenosine-3'-phosphate ((2S,4R)-1-[29-[[2-(acetylamino)-2-deoxy-beta-D-galactopyra nosyl]oxy]-14,14-bis[[3-[[3-[[5-[[2-(acetylamino)-2-deoxy-b eta-D-galactopyranosyl]oxy]-1-oxopentyl]amino]propyl]amino] -3-oxopropoxy]methyl]-1,12,19,25-tetraoxo-16-oxa-13,20,24-t riazanonacos-1-yl]-4-hydroxy-2-pyrrolidinyl)methyl ester
acctggtgctagatggatcaa

SEQ ID NO: 164 - RNA, 23 nt, synthetic construct
  source 1..23: mol_type = other RNA
  modified_base 1: mod_base = OTHER; note = 2'-O-methyladenosine-3'-phosphorothioate
  modified_base 2: mod_base = OTHER; note = 2'-deoxy-2'-fluorouridine-3'-phosphorothioate
  modified_base 3: mod_base = OTHER; note = 2'-O-methyladenosine-3'-phosphate
  modified_base 4: mod_base = OTHER; note = 2'-deoxy-2'-fluoroguanosine-3'-phosphate
  modified_base 5: mod_base = OTHER; note = 2'-O-methyluridine-3'-phosphate
  modified_base 6: mod_base = OTHER; note = 2'-deoxy-2'-fluorocytidine-3'-phosphate
  modified_base 7: mod_base = OTHER; note = 2'-O-methyladenosine-3'-phosphate
  modified_base 8: mod_base = OTHER; note = 2'-deoxy-2'-fluorouridine-3'-phosphate
  modified_base 9: mod_base = OTHER; note = 2'-O-methyladenosine-3'-phosphate
  modified_base 10: mod_base = OTHER; note = 2'-deoxy-2'-fluoroadenosine-3'-phosphate
  modified_base 11: mod_base = OTHER; note = 2'-O-methyladenosine-3'-phosphate
  modified_base 12: mod_base = OTHER; note = 2'-O-methyladenosine-3'-phosphate
  modified_base 13: mod_base = OTHER; note = 2'-O-methyluridine-3'-phosphate
  modified_base 14: mod_base = OTHER; note = 2'-deoxy-2'-fluorouridine-3'-phosphate
  modified_base 15: mod_base = OTHER; note = 2'-O-methylcytidine-3'-phosphate
  modified_base 16: mod_base = OTHER; note = 2'-deoxy-2'-fluoroadenosine-3'-phosphate
  modified_base 17: mod_base = OTHER; note = 2'-O-methylguanosine-3'-phosphate
  modified_base 18: mod_base = OTHER; note = 2'-deoxy-2'-fluoroguanosine-3'-phosphate
  modified_base 19: mod_base = OTHER; note = 2'-O-methyladenosine-3'-phosphate
  modified_base 20: mod_base = OTHER; note = 2'-deoxy-2'-fluoroadenosine-3'-phosphate
  modified_base 21: mod_base = OTHER; note = 2'-O-methyluridine-3'-phosphorothioate
  modified_base 22: mod_base = OTHER; note = 2'-O-methyluridine-3'-phosphorothioate
  modified_base 23: mod_base = OTHER; note = 2'-O-methylcytidine
atagtcataaaattcaggaattc

SEQ ID NO: 165 - RNA, 23 nt, synthetic construct
  source 1..23: mol_type = other RNA
  modified_base 1: mod_base = OTHER; note = 2'-O-methyluridine-3'-phosphorothioate
  modified_base 2: mod_base = OTHER; note = 2'-deoxy-2'-fluorouridine-3'-phosphorothioate
  modified_base 3: mod_base = OTHER; note = 2'-O-methyladenosine-3'-phosphate
  modified_base 4: mod_base = OTHER; note = 2'-deoxy-2'-fluorouridine-3'-phosphate
  modified_base 5: mod_base = OTHER; note = 2'-O-methyluridine-3'-phosphate
  modified_base 6: mod_base = OTHER; note = 2'-deoxy-2'-fluorocytidine-3'-phosphate
  modified_base 7: mod_base = OTHER; note = 2'-O-methyluridine-3'-phosphate
  modified_base 8: mod_base = OTHER; note = 2'-deoxy-2'-fluorouridine-3'-phosphate
  modified_base 9: mod_base = OTHER; note = 2'-O-methylguanosine-3'-phosphate
  modified_base 10: mod_base = OTHER; note = 2'-deoxy-2'-fluoroadenosine-3'-phosphate
  modified_base 11: mod_base = OTHER; note = 2'-O-methylguanosine-3'-phosphate
  modified_base 12: mod_base = OTHER; note = 2'-O-methylcytidine-3'-phosphate
  modified_base 13: mod_base = OTHER; note = 2'-O-methyluridine-3'-phosphate
  modified_base 14: mod_base = OTHER; note = 2'-deoxy-2'-fluorouridine-3'-phosphate
  modified_base 15: mod_base = OTHER; note = 2'-O-methylguanosine-3'-phosphate
  modified_base 16: mod_base = OTHER; note = 2'-deoxy-2'-fluoroadenosine-3'-phosphate
  modified_base 17: mod_base = OTHER; note = 2'-O-methyluridine-3'-phosphate
  modified_base 18: mod_base = OTHER; note = 2'-deoxy-2'-fluorocytidine-3'-phosphate
  modified_base 19: mod_base = OTHER; note = 2'-O-methyladenosine-3'-phosphate
  modified_base 20: mod_base = OTHER; note = 2'-deoxy-2'-fluoroguanosine-3'-phosphate
  modified_base 21: mod_base = OTHER; note = 2'-O-methylguanosine-3'-phosphorothioate
  modified_base 22: mod_base = OTHER; note = 2'-O-methylguanosine-3'-phosphorothioate
  modified_base 23: mod_base = OTHER; note = 2'-O-methylcytidine
ttattcttgagcttgatcagggc

SEQ ID NO: 166 - RNA, 23 nt, synthetic construct
  source 1..23: mol_type = other RNA
  modified_base 1: mod_base = OTHER; note = 2'-O-methyladenosine-3'-phosphorothioate
  modified_base 2: mod_base = OTHER; note = 2'-deoxy-2'-fluoroadenosine-3'-phosphorothioate
  modified_base 3: mod_base = OTHER; note = 2'-O-methyladenosine-3'-phosphate
  modified_base 4: mod_base = OTHER; note = 2'-deoxy-2'-fluorouridine-3'-phosphate
  modified_base 5: mod_base = OTHER; note = 2'-O-methyluridine-3'-phosphate
  modified_base 6: mod_base = OTHER; note = 2'-deoxy-2'-fluorocytidine-3'-phosphate
  modified_base 7: mod_base = OTHER; note = 2'-O-methyladenosine-3'-phosphate
  modified_base 8: mod_base = OTHER; note = 2'-deoxy-2'-fluoroguanosine-3'-phosphate
  modified_base 9: mod_base = OTHER; note = 2'-O-methylguanosine-3'-phosphate
  modified_base 10: mod_base = OTHER; note = 2'-deoxy-2'-fluoroadenosine-3'-phosphate
  modified_base 11: mod_base = OTHER; note = 2'-O-methyladenosine-3'-phosphate
  modified_base 12: mod_base = OTHER; note = 2'-O-methyluridine-3'-phosphate
  modified_base 13: mod_base = OTHER; note = 2'-O-methyluridine-3'-phosphate
  modified_base 14: mod_base = OTHER; note = 2'-deoxy-2'-fluorocytidine-3'-phosphate
  modified_base 15: mod_base = OTHER; note = 2'-O-methylcytidine-3'-phosphate
  modified_base 16: mod_base = OTHER; note = 2'-deoxy-2'-fluorouridine-3'-phosphate
  modified_base 17: mod_base = OTHER; note = 2'-O-methylguanosine-3'-phosphate
  modified_base 18: mod_base = OTHER; note = 2'-deoxy-2'-fluorocytidine-3'-phosphate
  modified_base 19: mod_base = OTHER; note = 2'-O-methyluridine-3'-phosphate
  modified_base 20: mod_base = OTHER; note = 2'-deoxy-2'-fluorouridine-3'-phosphate
  modified_base 21: mod_base = OTHER; note = 2'-O-methylcytidine-3'-phosphorothioate
  modified_base 22: mod_base = OTHER; note = 2'-O-methyluridine-3'-phosphorothioate
  modified_base 23: mod_base = OTHER; note = 2'-O-methyluridine
aaattcaggaattcctgcttctt

SEQ ID NO: 167 - RNA, 23 nt, synthetic construct
  source 1..23: mol_type = other RNA
  modified_base 1: mod_base = OTHER; note = 2'-O-methyluridine-3'-phosphorothioate
  modified_base 2: mod_base = OTHER; note = 2'-deoxy-2'-fluoroguanosine-3'-phosphorothioate
  modified_base 3: mod_base = OTHER; note = 2'-O-methyladenosine-3'-phosphate
  modified_base 4: mod_base = OTHER; note = 2'-deoxy-2'-fluorocytidine-3'-phosphate
  modified_base 5: mod_base = OTHER; note = 2'-O-methyluridine-3'-phosphate
  modified_base 6: mod_base = OTHER; note = 2'-deoxy-2'-fluorouridine-3'-phosphate
  modified_base 7: mod_base = OTHER; note = 2'-O-methyluridine-3'-phosphate
  modified_base 8: mod_base = OTHER; note = 2'-deoxy-2'-fluoroguanosine-3'-phosphate
  modified_base 9: mod_base = OTHER; note = 2'-O-methyladenosine-3'-phosphate
  modified_base 10: mod_base = OTHER; note = 2'-deoxy-2'-fluoroadenosine-3'-phosphate
  modified_base 11: mod_base = OTHER; note = 2'-O-methylcytidine-3'-phosphate
  modified_base 12: mod_base = OTHER; note = 2'-O-methyladenosine-3'-phosphate
  modified_base 13: mod_base = OTHER; note = 2'-O-methylcytidine-3'-phosphate
  modified_base 14: mod_base = OTHER; note = 2'-deoxy-2'-fluoroadenosine-3'-phosphate
  modified_base 15: mod_base = OTHER; note = 2'-O-methyluridine-3'-phosphate
  modified_base 16: mod_base = OTHER; note = 2'-deoxy-2'-fluoroguanosine-3'-phosphate
  modified_base 17: mod_base = OTHER; note = 2'-O-methyluridine-3'-phosphate
  modified_base 18: mod_base = OTHER; note = 2'-deoxy-2'-fluorouridine-3'-phosphate
  modified_base 19: mod_base = OTHER; note = 2'-O-methylguanosine-3'-phosphate
  modified_base 20: mod_base = OTHER; note = 2'-deoxy-2'-fluorocytidine-3'-phosphate
  modified_base 21: mod_base = OTHER; note = 2'-O-methyluridine-3'-phosphorothioate
  modified_base 22: mod_base = OTHER; note = 2'-O-methylcytidine-3'-phosphorothioate
  modified_base 23: mod_base = OTHER; note = 2'-O-methyladenosine
tgactttgaacacatgttgctca

SEQ ID NO: 168 - RNA, 23 nt, synthetic construct
  source 1..23: mol_type = other RNA
  modified_base 1: mod_base = OTHER; note = 2'-O-methyladenosine-3'-phosphorothioate
  modified_base 2: mod_base = OTHER; note = 2'-deoxy-2'-fluoroadenosine-3'-phosphorothioate
  modified_base 3: mod_base = OTHER; note = 2'-O-methyladenosine-3'-phosphate
  modified_base 4: mod_base = OTHER; note = 2'-deoxy-2'-fluoroguanosine-3'-phosphate
  modified_base 5: mod_base = OTHER; note = 2'-O-methyluridine-3'-phosphate
  modified_base 6: mod_base = OTHER; note = 2'-deoxy-2'-fluoroadenosine-3'-phosphate
  modified_base 7: mod_base = OTHER; note = 2'-O-methylcytidine-3'-phosphate
  modified_base 8: mod_base = OTHER; note = 2'-deoxy-2'-fluorouridine-3'-phosphate
  modified_base 9: mod_base = OTHER; note = 2'-O-methylcytidine-3'-phosphate
  modified_base 10: mod_base = OTHER; note = 2'-deoxy-2'-fluoroadenosine-3'-phosphate
  modified_base 11: mod_base = OTHER; note = 2'-O-methylguanosine-3'-phosphate
  modified_base 12: mod_base = OTHER; note = 2'-O-methyladenosine-3'-phosphate
  modified_base 13: mod_base = OTHER; note = 2'-O-methylcytidine-3'-phosphate
  modified_base 14: mod_base = OTHER; note = 2'-deoxy-2'-fluoroadenosine-3'-phosphate
  modified_base 15: mod_base = OTHER; note = 2'-O-methylcytidine-3'-phosphate
  modified_base 16: mod_base = OTHER; note = 2'-deoxy-2'-fluorocytidine-3'-phosphate
  modified_base 17: mod_base = OTHER; note = 2'-O-methyladenosine-3'-phosphate
  modified_base 18: mod_base = OTHER; note = 2'-deoxy-2'-fluorocytidine-3'-phosphate
  modified_base 19: mod_base = OTHER; note = 2'-O-methyladenosine-3'-phosphate
  modified_base 20: mod_base = OTHER; note = 2'-deoxy-2'-fluoroguanosine-3'-phosphate
  modified_base 21: mod_base = OTHER; note = 2'-O-methylcytidine-3'-phosphorothioate
  modified_base 22: mod_base = OTHER; note = 2'-O-methylcytidine-3'-phosphorothioate
  modified_base 23: mod_base = OTHER; note = 2'-O-methylcytidine
aaagtactcagacaccacagccc

SEQ ID NO: 169 - RNA, 23 nt, synthetic construct
  source 1..23: mol_type = other RNA
  modified_base 1: mod_base = OTHER; note = 2'-O-methyladenosine-3'-phosphorothioate
  modified_base 2: mod_base = OTHER; note = 2'-deoxy-2'-fluoroadenosine-3'-phosphorothioate
  modified_base 3: mod_base = OTHER; note = 2'-O-methyluridine-3'-phosphate
  modified_base 4: mod_base = OTHER; note = 2'-deoxy-2'-fluorouridine-3'-phosphate
  modified_base 5: mod_base = OTHER; note = 2'-O-methyladenosine-3'-phosphate
  modified_base 6: mod_base = OTHER; note = 2'-deoxy-2'-fluoroadenosine-3'-phosphate
  modified_base 7: mod_base = OTHER; note = 2'-O-methylguanosine-3'-phosphate
  modified_base 8: mod_base = OTHER; note = 2'-deoxy-2'-fluorouridine-3'-phosphate
  modified_base 9: mod_base = OTHER; note = 2'-O-methyluridine-3'-phosphate
  modified_base 10: mod_base = OTHER; note = 2'-deoxy-2'-fluoroguanosine-3'-phosphate
  modified_base 11: mod_base = OTHER; note = 2'-O-methyladenosine-3'-phosphate
  modified_base 12: mod_base = OTHER; note = 2'-O-methylcytidine-3'-phosphate
  modified_base 13: mod_base = OTHER; note = 2'-O-methyluridine-3'-phosphate
  modified_base 14: mod_base = OTHER; note = 2'-deoxy-2'-fluoroadenosine-3'-phosphate
  modified_base 15: mod_base = OTHER; note = 2'-O-methylguanosine-3'-phosphate
  modified_base 16: mod_base = OTHER; note = 2'-deoxy-2'-fluoroadenosine-3'-phosphate
  modified_base 17: mod_base = OTHER; note = 2'-O-methylcytidine-3'-phosphate
  modified_base 18: mod_base = OTHER; note = 2'-deoxy-2'-fluoroadenosine-3'-phosphate
  modified_base 19: mod_base = OTHER; note = 2'-O-methylcytidine-3'-phosphate
  modified_base 20: mod_base = OTHER; note = 2'-deoxy-2'-fluorouridine-3'-phosphate
  modified_base 21: mod_base = OTHER; note = 2'-O-methyluridine-3'-phosphorothioate
  modified_base 22: mod_base = OTHER; note = 2'-O-methyluridine-3'-phosphorothioate
  modified_base 23: mod_base = OTHER; note = 2'-O-methyluridine
aattaagttgactagacactttt

SEQ ID NO: 170 - RNA, 23 nt, synthetic construct
  source 1..23: mol_type = other RNA
  modified_base 1: mod_base = OTHER; note = 2'-O-methyluridine-3'-phosphorothioate
  modified_base 2: mod_base = OTHER; note = 2'-deoxy-2'-fluorouridine-3'-phosphorothioate
  modified_base 3: mod_base = OTHER; note = 2'-O-methylguanosine-3'-phosphate
  modified_base 4: mod_base = OTHER; note = 2'-deoxy-2'-fluoroadenosine-3'-phosphate
  modified_base 5: mod_base = OTHER; note = 2'-O-methylguanosine-3'-phosphate
  modified_base 6: mod_base = OTHER; note = 2'-deoxy-2'-fluorocytidine-3'-phosphate
  modified_base 7: mod_base = OTHER; note = 2'-O-methyladenosine-3'-phosphate
  modified_base 8: mod_base = OTHER; note = 2'-deoxy-2'-fluorouridine-3'-phosphate
  modified_base 9: mod_base = OTHER; note = 2'-O-methylcytidine-3'-phosphate
  modified_base 10: mod_base = OTHER; note = 2'-deoxy-2'-fluorouridine-3'-phosphate
  modified_base 11: mod_base = OTHER; note = 2'-O-methylcytidine-3'-phosphate
  modified_base 12: mod_base = OTHER; note = 2'-O-methyluridine-3'-phosphate
  modified_base 13: mod_base = OTHER; note = 2'-O-methylcytidine-3'-phosphate
  modified_base 14: mod_base = OTHER; note = 2'-deoxy-2'-fluorouridine-3'-phosphate
  modified_base 15: mod_base = OTHER; note = 2'-O-methylcytidine-3'-phosphate
  modified_base 16: mod_base = OTHER; note = 2'-deoxy-2'-fluoroadenosine-3'-phosphate
  modified_base 17: mod_base = OTHER; note = 2'-O-methylcytidine-3'-phosphate
  modified_base 18: mod_base = OTHER; note = 2'-deoxy-2'-fluoroadenosine-3'-phosphate
  modified_base 19: mod_base = OTHER; note = 2'-O-methylguanosine-3'-phosphate
  modified_base 20: mod_base = OTHER; note = 2'-deoxy-2'-fluorocytidine-3'-phosphate
  modified_base 21: mod_base = OTHER; note = 2'-O-methyluridine-3'-phosphorothioate
  modified_base 22: mod_base = OTHER; note = 2'-O-methylguanosine-3'-phosphorothioate
  modified_base 23: mod_base = OTHER; note = 2'-O-methylcytidine
ttgagcatctctctcacagctgc

SEQ ID NO: 171 - RNA, 23 nt, synthetic construct
  source 1..23: mol_type = other RNA
  modified_base 1: mod_base = OTHER; note = 2'-O-methyluridine-3'-phosphorothioate
  modified_base 2: mod_base = OTHER; note = 2'-deoxy-2'-fluorouridine-3'-phosphorothioate
  modified_base 3: mod_base = OTHER; note = 2'-O-methylguanosine-3'-phosphate
  modified_base 4: mod_base = OTHER; note = 2'-deoxy-2'-fluoroadenosine-3'-phosphate
  modified_base 5: mod_base = OTHER; note = 2'-O-methylcytidine-3'-phosphate
  modified_base 6: mod_base = OTHER; note = 2'-deoxy-2'-fluorouridine-3'-phosphate
  modified_base 7: mod_base = OTHER; note = 2'-O-methyladenosine-3'-phosphate
  modified_base 8: mod_base = OTHER; note = 2'-deoxy-2'-fluoroguanosine-3'-phosphate
  modified_base 9: mod_base = OTHER; note = 2'-O-methyladenosine-3'-phosphate
  modified_base 10: mod_base = OTHER; note = 2'-deoxy-2'-fluorocytidine-3'-phosphate
  modified_base 11: mod_base = OTHER; note = 2'-O-methyladenosine-3'-phosphate
  modified_base 12: mod_base = OTHER; note = 2'-O-methylcytidine-3'-phosphate
  modified_base 13: mod_base = OTHER; note = 2'-O-methyluridine-3'-phosphate
  modified_base 14: mod_base = OTHER; note = 2'-deoxy-2'-fluorouridine-3'-phosphate
  modified_base 15: mod_base = OTHER; note = 2'-O-methyluridine-3'-phosphate
  modified_base 16: mod_base = OTHER; note = 2'-deoxy-2'-fluorouridine-3'-phosphate
  modified_base 17: mod_base = OTHER; note = 2'-O-methyluridine-3'-phosphate
  modified_base 18: mod_base = OTHER; note = 2'-deoxy-2'-fluoroguanosine-3'-phosphate
  modified_base 19: mod_base = OTHER; note = 2'-O-methylguanosine-3'-phosphate
  modified_base 20: mod_base = OTHER; note = 2'-deoxy-2'-fluorocytidine-3'-phosphate
  modified_base 21: mod_base = OTHER; note = 2'-O-methyluridine-3'-phosphorothioate
  modified_base 22: mod_base = OTHER; note = 2'-O-methylcytidine-3'-phosphorothioate
  modified_base 23: mod_base = OTHER; note = 2'-O-methylcytidine
ttgactagacactttttggctcc

SEQ ID NO: 172 - RNA, 23 nt, synthetic construct
  source 1..23: mol_type = other RNA
  modified_base 1: mod_base = OTHER; note = 2'-O-methyladenosine-3'-phosphorothioate
  modified_base 2: mod_base = OTHER; note = 2'-deoxy-2'-fluoroadenosine-3'-phosphorothioate
  modified_base 3: mod_base = OTHER; note = 2'-O-methyladenosine-3'-phosphate
  modified_base 4: mod_base = OTHER; note = 2'-deoxy-2'-fluoroguanosine-3'-phosphate
  modified_base 5: mod_base = OTHER; note = 2'-O-methyladenosine-3'-phosphate
  modified_base 6: mod_base = OTHER; note = 2'-deoxy-2'-fluoroguanosine-3'-phosphate
  modified_base 7: mod_base = OTHER; note = 2'-O-methyladenosine-3'-phosphate
  modified_base 8: mod_base = OTHER; note = 2'-deoxy-2'-fluorouridine-3'-phosphate
  modified_base 9: mod_base = OTHER; note = 2'-O-methylcytidine-3'-phosphate
  modified_base 10: mod_base = OTHER; note = 2'-deoxy-2'-fluorouridine-3'-phosphate
  modified_base 11: mod_base = OTHER; note = 2'-O-methylcytidine-3'-phosphate
  modified_base 12: mod_base = OTHER; note = 2'-O-methyladenosine-3'-phosphate
  modified_base 13: mod_base = OTHER; note = 2'-O-methyluridine-3'-phosphate
  modified_base 14: mod_base = OTHER; note = 2'-deoxy-2'-fluorocytidine-3'-phosphate
  modified_base 15: mod_base = OTHER; note = 2'-O-methyladenosine-3'-phosphate
  modified_base 16: mod_base = OTHER; note = 2'-deoxy-2'-fluorocytidine-3'-phosphate
  modified_base 17: mod_base = OTHER; note = 2'-O-methyluridine-3'-phosphate
  modified_base 18: mod_base = OTHER; note = 2'-deoxy-2'-fluorocytidine-3'-phosphate
  modified_base 19: mod_base = OTHER; note = 2'-O-methyladenosine-3'-phosphate
  modified_base 20: mod_base = OTHER; note = 2'-deoxy-2'-fluorocytidine-3'-phosphate
  modified_base 21: mod_base = OTHER; note = 2'-O-methyladenosine-3'-phosphorothioate
  modified_base 22: mod_base = OTHER; note = 2'-O-methyluridine-3'-phosphorothioate
  modified_base 23: mod_base = OTHER; note = 2'-O-methyluridine
aaagagatctcatcactcacatt

SEQ ID NO: 173 - RNA, 23 nt, synthetic construct
  source 1..23: mol_type = other RNA
  modified_base 1: mod_base = OTHER; note = 2'-O-methyluridine-3'-phosphorothioate
  modified_base 2: mod_base = OTHER; note = 2'-deoxy-2'-fluoroadenosine-3'-phosphorothioate
  modified_base 3: mod_base = OTHER; note = 2'-O-methyladenosine-3'-phosphate
  modified_base 4: mod_base = OTHER; note = 2'-deoxy-2'-fluorocytidine-3'-phosphate
  modified_base 5: mod_base = OTHER; note = 2'-O-methyluridine-3'-phosphate
  modified_base 6: mod_base = OTHER; note = 2'-deoxy-2'-fluorouridine-3'-phosphate
  modified_base 7: mod_base = OTHER; note = 2'-O-methylguanosine-3'-phosphate
  modified_base 8: mod_base = OTHER; note = 2'-deoxy-2'-fluorocytidine-3'-phosphate
  modified_base 9: mod_base = OTHER; note = 2'-O-methylcytidine-3'-phosphate
  modified_base 10: mod_base = OTHER; note = 2'-deoxy-2'-fluoroadenosine-3'-phosphate
  modified_base 11: mod_base = OTHER; note = 2'-O-methylcytidine-3'-phosphate
  modified_base 12: mod_base = OTHER; note = 2'-O-methylcytidine-3'-phosphate
  modified_base 13: mod_base = OTHER; note = 2'-O-methyluridine-3'-phosphate
  modified_base 14: mod_base = OTHER; note = 2'-deoxy-2'-fluorouridine-3'-phosphate
  modified_base 15: mod_base = OTHER; note = 2'-O-methylcytidine-3'-phosphate
  modified_base 16: mod_base = OTHER; note = 2'-deoxy-2'-fluorouridine-3'-phosphate
  modified_base 17: mod_base = OTHER; note = 2'-O-methylcytidine-3'-phosphate
  modified_base 18: mod_base = OTHER; note = 2'-deoxy-2'-fluoroadenosine-3'-phosphate
  modified_base 19: mod_base = OTHER; note = 2'-O-methyladenosine-3'-phosphate
  modified_base 20: mod_base = OTHER; note = 2'-deoxy-2'-fluorouridine-3'-phosphate
  modified_base 21: mod_base = OTHER; note = 2'-O-methyluridine-3'-phosphorothioate
  modified_base 22: mod_base = OTHER; note = 2'-O-methyladenosine-3'-phosphorothioate
  modified_base 23: mod_base = OTHER; note = 2'-O-methyladenosine
taacttgccaccttctcaattaa

SEQ ID NO: 174 - RNA, 23 nt, synthetic construct
  source 1..23: mol_type = other RNA
  modified_base 1: mod_base = OTHER; note = 2'-O-methylcytidine-3'-phosphorothioate
  modified_base 2: mod_base = OTHER; note = 2'-deoxy-2'-fluorouridine-3'-phosphorothioate
  modified_base 3: mod_base = OTHER; note = 2'-O-methyluridine-3'-phosphate
  modified_base 4: mod_base = OTHER; note = 2'-deoxy-2'-fluoroguanosine-3'-phosphate
  modified_base 5: mod_base = OTHER; note = 2'-O-methyladenosine-3'-phosphate
  modified_base 6: mod_base = OTHER; note = 2'-deoxy-2'-fluorocytidine-3'-phosphate
  modified_base 7: mod_base = OTHER; note = 2'-O-methyluridine-3'-phosphate
  modified_base 8: mod_base = OTHER; note = 2'-deoxy-2'-fluorouridine-3'-phosphate
  modified_base 9: mod_base = OTHER; note = 2'-O-methyluridine-3'-phosphate
  modified_base 10: mod_base = OTHER; note = 2'-deoxy-2'-fluoroguanosine-3'-phosphate
  modified_base 11: mod_base = OTHER; note = 2'-O-methyladenosine-3'-phosphate
  modified_base 12: mod_base = OTHER; note = 2'-O-methyladenosine-3'-phosphate
  modified_base 13: mod_base = OTHER; note = 2'-O-methylcytidine-3'-phosphate
  modified_base 14: mod_base = OTHER; note = 2'-deoxy-2'-fluoroadenosine-3'-phosphate
  modified_base 15: mod_base = OTHER; note = 2'-O-methylcytidine-3'-phosphate
  modified_base 16: mod_base = OTHER; note = 2'-deoxy-2'-fluoroadenosine-3'-phosphate
  modified_base 17: mod_base = OTHER; note = 2'-O-methyluridine-3'-phosphate
  modified_base 18: mod_base = OTHER; note = 2'-deoxy-2'-fluoroguanosine-3'-phosphate
  modified_base 19: mod_base = OTHER; note = 2'-O-methyluridine-3'-phosphate
  modified_base 20: mod_base = OTHER; note = 2'-deoxy-2'-fluorouridine-3'-phosphate
  modified_base 21: mod_base = OTHER; note = 2'-O-methylguanosine-3'-phosphorothioate
  modified_base 22: mod_base = OTHER; note = 2'-O-methylcytidine-3'-phosphorothioate
  modified_base 23: mod_base = OTHER; note = 2'-O-methyluridine
cttgactttgaacacatgttgct

SEQ ID NO: 175 - RNA, 23 nt, synthetic construct
  source 1..23: mol_type = other RNA
  modified_base 1: mod_base = OTHER; note = 2'-O-methyladenosine-3'-phosphorothioate
  modified_base 2: mod_base = OTHER; note = 2'-deoxy-2'-fluorouridine-3'-phosphorothioate
  modified_base 3: mod_base = OTHER; note = 2'-O-methyladenosine-3'-phosphate
  modified_base 4: mod_base = OTHER; note = 2'-deoxy-2'-fluorouridine-3'-phosphate
  modified_base 5: mod_base = OTHER; note = 2'-O-methyluridine-3'-phosphate
  modified_base 6: mod_base = OTHER; note = 2'-deoxy-2'-fluoroguanosine-3'-phosphate
  modified_base 7: mod_base = OTHER; note = 2'-O-methyladenosine-3'-phosphate
  modified_base 8: mod_base = OTHER; note = 2'-deoxy-2'-fluoroguanosine-3'-phosphate
  modified_base 9: mod_base = OTHER; note = 2'-O-methylcytidine-3'-phosphate
  modified_base 10: mod_base = OTHER; note = 2'-deoxy-2'-fluoroadenosine-3'-phosphate
  modified_base 11: mod_base = OTHER; note = 2'-O-methyluridine-3'-phosphate
  modified_base 12: mod_base = OTHER; note = 2'-O-methylcytidine-3'-phosphate
  modified_base 13: mod_base = OTHER; note = 2'-O-methyluridine-3'-phosphate
  modified_base 14: mod_base = OTHER; note = 2'-deoxy-2'-fluorocytidine-3'-phosphate
  modified_base 15: mod_base = OTHER; note = 2'-O-methyluridine-3'-phosphate
  modified_base 16: mod_base = OTHER; note = 2'-deoxy-2'-fluorocytidine-3'-phosphate
  modified_base 17: mod_base = OTHER; note = 2'-O-methyluridine-3'-phosphate
  modified_base 18: mod_base = OTHER; note = 2'-deoxy-2'-fluorocytidine-3'-phosphate
  modified_base 19: mod_base = OTHER; note = 2'-O-methyladenosine-3'-phosphate
  modified_base 20: mod_base = OTHER; note = 2'-deoxy-2'-fluorocytidine-3'-phosphate
  modified_base 21: mod_base = OTHER; note = 2'-O-methyladenosine-3'-phosphorothioate
  modified_base 22: mod_base = OTHER; note = 2'-O-methylguanosine-3'-phosphorothioate
  modified_base 23: mod_base = OTHER; note = 2'-O-methylcytidine
atattgagcatctctctcacagc

SEQ ID NO: 176 - RNA, 23 nt, synthetic construct
  source 1..23: mol_type = other RNA
  modified_base 1: mod_base = OTHER; note = 2'-O-methyluridine-3'-phosphorothioate
  modified_base 2: mod_base = OTHER; note = 2'-deoxy-2'-fluorocytidine-3'-phosphorothioate
  modified_base 3: mod_base = OTHER; note = 2'-O-methyluridine-3'-phosphate
  modified_base 4: mod_base = OTHER; note = 2'-deoxy-2'-fluorocytidine-3'-phosphate
  modified_base 5: mod_base = OTHER; note = 2'-O-methyladenosine-3'-phosphate
  modified_base 6: mod_base = OTHER; note = 2'-deoxy-2'-fluoroadenosine-3'-phosphate
  modified_base 7: mod_base = OTHER; note = 2'-O-methyluridine-3'-phosphate
  modified_base 8: mod_base = OTHER; note = 2'-deoxy-2'-fluorouridine-3'-phosphate
  modified_base 9: mod_base = OTHER; note = 2'-O-methyladenosine-3'-phosphate
  modified_base 10: mod_base = OTHER; note = 2'-deoxy-2'-fluoroadenosine-3'-phosphate
  modified_base 11: mod_base = OTHER; note = 2'-O-methylguanosine-3'-phosphate
  modified_base 12: mod_base = OTHER; note = 2'-O-methyluridine-3'-phosphate
  modified_base 13: mod_base = OTHER; note = 2'-O-methyluridine-3'-phosphate
  modified_base 14: mod_base = OTHER; note = 2'-deoxy-2'-fluoroguanosine-3'-phosphate
  modified_base 15: mod_base = OTHER; note = 2'-O-methyladenosine-3'-phosphate
  modified_base 16: mod_base = OTHER; note = 2'-deoxy-2'-fluorocytidine-3'-phosphate
  modified_base 17: mod_base = OTHER; note = 2'-O-methyluridine-3'-phosphate
  modified_base 18: mod_base = OTHER; note = 2'-deoxy-2'-fluoroadenosine-3'-phosphate
  modified_base 19: mod_base = OTHER; note = 2'-O-methylguanosine-3'-phosphate
  modified_base 20: mod_base = OTHER; note = 2'-deoxy-2'-fluoroadenosine-3'-phosphate
  modified_base 21: mod_base = OTHER; note = 2'-O-methylcytidine-3'-phosphorothioate
  modified_base 22: mod_base = OTHER; note = 2'-O-methyladenosine-3'-phosphorothioate
  modified_base 23: mod_base = OTHER; note = 2'-O-methylcytidine
tctcaattaagttgactagacac

SEQ ID NO: 177 - RNA, 23 nt, synthetic construct
  source 1..23: mol_type = other RNA
  modified_base 1: mod_base = OTHER; note = 2'-O-methyluridine-3'-phosphorothioate
  modified_base 2: mod_base = OTHER; note = 2'-deoxy-2'-fluorouridine-3'-phosphorothioate
  modified_base 3: mod_base = OTHER; note = 2'-O-methylguanosine-3'-phosphate
  modified_base 4: mod_base = OTHER; note = 2'-deoxy-2'-fluorocytidine-3'-phosphate
  modified_base 5: mod_base = OTHER; note = 2'-O-methyluridine-3'-phosphate
  modified_base 6: mod_base = OTHER; note = 2'-deoxy-2'-fluorocytidine-3'-phosphate
  modified_base 7: mod_base = OTHER; note = 2'-O-methyladenosine-3'-phosphate
  modified_base 8: mod_base = OTHER; note = 2'-deoxy-2'-fluorouridine-3'-phosphate
  modified_base 9: mod_base = OTHER; note = 2'-O-methyluridine-3'-phosphate
  modified_base 10: mod_base = OTHER; note = 2'-deoxy-2'-fluoroguanosine-3'-phosphate
  modified_base 11: mod_base = OTHER; note = 2'-O-methyluridine-3'-phosphate
  modified_base 12: mod_base = OTHER; note = 2'-O-methylcytidine-3'-phosphate
  modified_base 13: mod_base = OTHER; note = 2'-O-methyluridine-3'-phosphate
  modified_base 14: mod_base = OTHER; note = 2'-deoxy-2'-fluorouridine-3'-phosphate
  modified_base 15: mod_base = OTHER; note = 2'-O-methyluridine-3'-phosphate
  modified_base 16: mod_base = OTHER; note = 2'-deoxy-2'-fluorocytidine-3'-phosphate
  modified_base 17: mod_base = OTHER; note = 2'-O-methyluridine-3'-phosphate
  modified_base 18: mod_base = OTHER; note = 2'-deoxy-2'-fluorouridine-3'-phosphate
  modified_base 19: mod_base = OTHER; note = 2'-O-methylguanosine-3'-phosphate
  modified_base 20: mod_base = OTHER; note = 2'-deoxy-2'-fluoroguanosine-3'-phosphate
  modified_base 21: mod_base = OTHER; note = 2'-O-methyladenosine-3'-phosphorothioate
  modified_base 22: mod_base = OTHER; note = 2'-O-methyladenosine-3'-phosphorothioate
  modified_base 23: mod_base = OTHER; note = 2'-O-methylguanosine
ttgctcattgtctttcttggaag

SEQ ID NO: 178 - RNA, 23 nt, synthetic construct
  source 1..23: mol_type = other RNA
  modified_base 1: mod_base = OTHER; note = 2'-O-methyladenosine-3'-phosphorothioate
  modified_base 2: mod_base = OTHER; note = 2'-deoxy-2'-fluorouridine-3'-phosphorothioate
  modified_base 3: mod_base = OTHER; note = 2'-O-methyladenosine-3'-phosphate
  modified_base 4: mod_base = OTHER; note = 2'-deoxy-2'-fluorouridine-3'-phosphate
  modified_base 5: mod_base = OTHER; note = 2'-O-methylcytidine-3'-phosphate
  modified_base 6: mod_base = OTHER; note = 2'-deoxy-2'-fluorocytidine-3'-phosphate
  modified_base 7: mod_base = OTHER; note = 2'-O-methyluridine-3'-phosphate
  modified_base 8: mod_base = OTHER; note = 2'-deoxy-2'-fluorouridine-3'-phosphate
  modified_base 9: mod_base = OTHER; note = 2'-O-methylguanosine-3'-phosphate
  modified_base 10: mod_base = OTHER; note = 2'-deoxy-2'-fluoroadenosine-3'-phosphate
  modified_base 11: mod_base = OTHER; note = 2'-O-methylcytidine-3'-phosphate
  modified_base 12: mod_base = OTHER; note = 2'-O-methyluridine-3'-phosphate
  modified_base 13: mod_base = OTHER; note = 2'-O-methyluridine-3'-phosphate
  modified_base 14: mod_base = OTHER; note = 2'-deoxy-2'-fluorouridine-3'-phosphate
  modified_base 15: mod_base = OTHER; note = 2'-O-methylguanosine-3'-phosphate
  modified_base 16: mod_base = OTHER; note = 2'-deoxy-2'-fluoroadenosine-3'-phosphate
  modified_base 17: mod_base = OTHER; note = 2'-O-methyladenosine-3'-phosphate
  modified_base 18: mod_base = OTHER; note = 2'-deoxy-2'-fluorocytidine-3'-phosphate
  modified_base 19: mod_base = OTHER; note = 2'-O-methyladenosine-3'-phosphate
  modified_base 20: mod_base = OTHER; note = 2'-deoxy-2'-fluorocytidine-3'-phosphate
  modified_base 21: mod_base = OTHER; note = 2'-O-methyladenosine-3'-phosphorothioate
  modified_base 22: mod_base = OTHER; note = 2'-O-methyluridine-3'-phosphorothioate
  modified_base 23: mod_base = OTHER; note = 2'-O-methylguanosine
atatccttgactttgaacacatg

SEQ ID NO: 179 - RNA, 23 nt, synthetic construct
  source 1..23: mol_type = other RNA
  modified_base 1: mod_base = OTHER; note = 2'-O-methylcytidine-3'-phosphorothioate
  modified_base 2: mod_base = OTHER; note = 2'-deoxy-2'-fluoroadenosine-3'-phosphorothioate
  modified_base 3: mod_base = OTHER; note = 2'-O-methyladenosine-3'-phosphate
  modified_base 4: mod_base = OTHER; note = 2'-deoxy-2'-fluoroguanosine-3'-phosphate
  modified_base 5: mod_base = OTHER; note = 2'-O-methyluridine-3'-phosphate
  modified_base 6: mod_base = OTHER; note = 2'-deoxy-2'-fluorocytidine-3'-phosphate
  modified_base 7: mod_base = OTHER; note = 2'-O-methylcytidine-3'-phosphate
  modified_base 8: mod_base = OTHER; note = 2'-deoxy-2'-fluorocytidine-3'-phosphate
  modified_base 9: mod_base = OTHER; note = 2'-O-methylguanosine-3'-phosphate
  modified_base 10: mod_base = OTHER; note = 2'-deoxy-2'-fluoroguanosine-3'-phosphate
  modified_base 11: mod_base = OTHER; note = 2'-O-methyladenosine-3'-phosphate
  modified_base 12: mod_base = OTHER; note = 2'-O-methyluridine-3'-phosphate
  modified_base 13: mod_base = OTHER; note = 2'-O-methylcytidine-3'-phosphate
  modified_base 14: mod_base = OTHER; note = 2'-deoxy-2'-fluorouridine-3'-phosphate
  modified_base 15: mod_base = OTHER; note = 2'-O-methylcytidine-3'-phosphate
  modified_base 16: mod_base = OTHER; note = 2'-deoxy-2'-fluoroadenosine-3'-phosphate
  modified_base 17: mod_base = OTHER; note = 2'-O-methyluridine-3'-phosphate
  modified_base 18: mod_base = OTHER; note = 2'-deoxy-2'-fluorocytidine-3'-phosphate
  modified_base 19: mod_base = OTHER; note = 2'-O-methyladenosine-3'-phosphate
  modified_base 20: mod_base = OTHER; note = 2'-deoxy-2'-fluoroadenosine-3'-phosphate
  modified_base 21: mod_base = OTHER; note = 2'-O-methyluridine-3'-phosphorothioate
  modified_base 22: mod_base = OTHER; note = 2'-O-methylguanosine-3'-phosphorothioate
  modified_base 23: mod_base = OTHER; note = 2'-O-methyladenosine
caagtcccggatctcatcaatga

SEQ ID NO: 180 - RNA, 23 nt, synthetic construct
  source 1..23: mol_type = other RNA
  modified_base 1: mod_base = OTHER; note = 2'-O-methyluridine-3'-phosphorothioate
  modified_base 2: mod_base = OTHER; note = 2'-deoxy-2'-fluoroadenosine-3'-phosphorothioate
  modified_base 3: mod_base = OTHER; note = 2'-O-methyluridine-3'-phosphate
  modified_base 4: mod_base = OTHER; note = 2'-deoxy-2'-fluorouridine-3'-phosphate
  modified_base 5: mod_base = OTHER; note = 2'-O-methylguanosine-3'-phosphate
  modified_base 6: mod_base = OTHER; note = 2'-deoxy-2'-fluoroadenosine-3'-phosphate
  modified_base 7: mod_base = OTHER; note = 2'-O-methylguanosine-3'-phosphate
  modified_base 8: mod_base = OTHER; note = 2'-deoxy-2'-fluorocytidine-3'-phosphate
  modified_base 9: mod_base = OTHER; note = 2'-O-methyladenosine-3'-phosphate
  modified_base 10: mod_base = OTHER; note = 2'-deoxy-2'-fluorouridine-3'-phosphate
  modified_base 11: mod_base = OTHER; note = 2'-O-methylcytidine-3'-phosphate
  modified_base 12: mod_base = OTHER; note = 2'-O-methyluridine-3'-phosphate
  modified_base 13: mod_base = OTHER; note = 2'-O-methylcytidine-3'-phosphate
  modified_base 14: mod_base = OTHER; note = 2'-deoxy-2'-fluorouridine-3'-phosphate
  modified_base 15: mod_base = OTHER; note = 2'-O-methylcytidine-3'-phosphate
  modified_base 16: mod_base = OTHER; note = 2'-deoxy-2'-fluorouridine-3'-phosphate
  modified_base 17: mod_base = OTHER; note = 2'-O-methylcytidine-3'-phosphate
  modified_base 18: mod_base = OTHER; note = 2'-deoxy-2'-fluoroadenosine-3'-phosphate
  modified_base 19: mod_base = OTHER; note = 2'-O-methylcytidine-3'-phosphate
  modified_base 20: mod_base = OTHER; note = 2'-deoxy-2'-fluoroadenosine-3'-phosphate
  modified_base 21: mod_base = OTHER; note = 2'-O-methylguanosine-3'-phosphorothioate
  modified_base 22: mod_base = OTHER; note = 2'-O-methylcytidine-3'-phosphorothioate
  modified_base 23: mod_base = OTHER; note = 2'-O-methyluridine
tattgagcatctctctcacagct

SEQ ID NO: 181 - RNA, 23 nt, synthetic construct
  source 1..23: mol_type = other RNA
  modified_base 1: mod_base = OTHER; note = 2'-O-methyluridine-3'-phosphorothioate
  modified_base 2: mod_base = OTHER; note = 2'-deoxy-2'-fluoroguanosine-3'-phosphorothioate
  modified_base 3: mod_base = OTHER; note = 2'-O-methyladenosine-3'-phosphate
  modified_base 4: mod_base = OTHER; note = 2'-deoxy-2'-fluorocytidine-3'-phosphate
  modified_base 5: mod_base = OTHER; note = 2'-O-methyluridine-3'-phosphate
  modified_base 6: mod_base = OTHER; note = 2'-deoxy-2'-fluoroadenosine-3'-phosphate
  modified_base 7: mod_base = OTHER; note = 2'-O-methylguanosine-3'-phosphate
  modified_base 8: mod_base = OTHER; note = 2'-deoxy-2'-fluoroadenosine-3'-phosphate
  modified_base 9: mod_base = OTHER; note = 2'-O-methylcytidine-3'-phosphate
  modified_base 10: mod_base = OTHER; note = 2'-deoxy-2'-fluoroadenosine-3'-phosphate
  modified_base 11: mod_base = OTHER; note = 2'-O-methylcytidine-3'-phosphate
  modified_base 12: mod_base = OTHER; note = 2'-O-methyluridine-3'-phosphate
  modified_base 13: mod_base = OTHER; note = 2'-O-methyluridine-3'-phosphate
  modified_base 14: mod_base = OTHER; note = 2'-deoxy-2'-fluorouridine-3'-phosphate
  modified_base 15: mod_base = OTHER; note = 2'-O-methyluridine-3'-phosphate
  modified_base 16: mod_base = OTHER; note = 2'-deoxy-2'-fluorouridine-3'-phosphate
  modified_base 17: mod_base = OTHER; note = 2'-O-methylguanosine-3'-phosphate
  modified_base 18: mod_base = OTHER; note = 2'-deoxy-2'-fluoroguanosine-3'-phosphate
  modified_base 19: mod_base = OTHER; note = 2'-O-methylcytidine-3'-phosphate
  modified_base 20: mod_base = OTHER; note = 2'-deoxy-2'-fluorouridine-3'-phosphate
  modified_base 21: mod_base = OTHER; note = 2'-O-methylcytidine-3'-phosphorothioate
  modified_base 22: mod_base = OTHER; note = 2'-O-methylcytidine-3'-phosphorothioate
  modified_base 23: mod_base = OTHER; note = 2'-O-methyluridine
tgactagacactttttggctcct

SEQ ID NO: 182 - RNA, 23 nt, synthetic construct
  source 1..23: mol_type = other RNA
  modified_base 1: mod_base = OTHER; note = 2'-O-methyladenosine-3'-phosphorothioate
  modified_base 2: mod_base = OTHER; note = 2'-deoxy-2'-fluoroadenosine-3'-phosphorothioate
  modified_base 3: mod_base = OTHER; note = 2'-O-methylcytidine-3'-phosphate
  modified_base 4: mod_base = OTHER; note = 2'-deoxy-2'-fluorocytidine-3'-phosphate
  modified_base 5: mod_base = OTHER; note = 2'-O-methylcytidine-3'-phosphate
  modified_base 6: mod_base = OTHER; note = 2'-deoxy-2'-fluoroadenosine-3'-phosphate
  modified_base 7: mod_base = OTHER; note = 2'-O-methyladenosine-3'-phosphate
  modified_base 8: mod_base = OTHER; note = 2'-deoxy-2'-fluoroadenosine-3'-phosphate
  modified_base 9: mod_base = OTHER; note = 2'-O-methyluridine-3'-phosphate
  modified_base 10: mod_base = OTHER; note = 2'-deoxy-2'-fluorocytidine-3'-phosphate
  modified_base 11: mod_base = OTHER; note = 2'-O-methylcytidine-3'-phosphate
  modified_base 12: mod_base = OTHER; note = 2'-O-methyluridine-3'-phosphate
  modified_base 13: mod_base = OTHER; note = 2'-O-methylcytidine-3'-phosphate
  modified_base 14: mod_base = OTHER; note = 2'-deoxy-2'-fluoroadenosine-3'-phosphate
  modified_base 15: mod_base = OTHER; note = 2'-O-methyluridine-3'-phosphate
  modified_base 16: mod_base = OTHER; note = 2'-deoxy-2'-fluorocytidine-3'-phosphate
  modified_base 17: mod_base = OTHER; note = 2'-O-methyluridine-3'-phosphate
  modified_base 18: mod_base = OTHER; note = 2'-deoxy-2'-fluorouridine-3'-phosphate
  modified_base 19: mod_base = OTHER; note = 2'-O-methylguanosine-3'-phosphate
  modified_base 20: mod_base = OTHER; note = 2'-deoxy-2'-fluoroguanosine-3'-phosphate
  modified_base 21: mod_base = OTHER; note = 2'-O-methyladenosine-3'-phosphorothioate
  modified_base 22: mod_base = OTHER; note = 2'-O-methylguanosine-3'-phosphorothioate
  modified_base 23: mod_base = OTHER; note = 2'-O-methyluridine
aacccaaatcctcatcttggagt

SEQ ID NO: 183 - RNA, 23 nt, synthetic construct
  source 1..23: mol_type = other RNA
  modified_base 1: mod_base = OTHER; note = 2'-O-methyluridine-3'-phosphorothioate
  modified_base 2: mod_base = OTHER; note = 2'-deoxy-2'-fluorocytidine-3'-phosphorothioate
  modified_base 3: mod_base = OTHER; note = 2'-O-methyluridine-3'-phosphate
  modified_base 4: mod_base = OTHER; note = 2'-deoxy-2'-fluorocytidine-3'-phosphate
  modified_base 5: mod_base = OTHER; note = 2'-O-methyluridine-3'-phosphate
  modified_base 6: mod_base = OTHER; note = 2'-deoxy-2'-fluorouridine-3'-phosphate
  modified_base 7: mod_base = OTHER; note = 2'-O-methylguanosine-3'-phosphate
  modified_base 8: mod_base = OTHER; note = 2'-deoxy-2'-fluorouridine-3'-phosphate
  modified_base 9: mod_base = OTHER; note = 2'-O-methylguanosine-3'-phosphate
  modified_base 10: mod_base = OTHER; note = 2'-deoxy-2'-fluoroadenosine-3'-phosphate
  modified_base 11: mod_base = OTHER; note = 2'-O-methyladenosine-3'-phosphate
  modified_base 12: mod_base = OTHER; note = 2'-O-methylcytidine-3'-phosphate
  modified_base 13: mod_base = OTHER; note = 2'-O-methyluridine-3'-phosphate
  modified_base 14: mod_base = OTHER; note = 2'-deoxy-2'-fluoroadenosine-3'-phosphate
  modified_base 15: mod_base = OTHER; note = 2'-O-methyluridine-3'-phosphate
  modified_base 16: mod_base = OTHER; note = 2'-deoxy-2'-fluorocytidine-3'-phosphate
  modified_base 17: mod_base = OTHER; note = 2'-O-methyladenosine-3'-phosphate
  modified_base 18: mod_base = OTHER; note = 2'-deoxy-2'-fluoroadenosine-3'-phosphate
  modified_base 19: mod_base = OTHER; note = 2'-O-methylguanosine-3'-phosphate
  modified_base 20: mod_base = OTHER; note = 2'-deoxy-2'-fluoroguanosine-3'-phosphate
  modified_base 21: mod_base = OTHER; note = 2'-O-methylguanosine-3'-phosphorothioate
  modified_base 22: mod_base = OTHER; note = 2'-O-methylguanosine-3'-phosphorothioate
  modified_base 23: mod_base = OTHER; note = 2'-O-methylcytidine
tctcttgtgaactatcaaggggc

SEQ ID NO: 184 - RNA, 23 nt, synthetic construct
  source 1..23: mol_type = other RNA
  modified_base 1: mod_base = OTHER; note = 2'-O-methyluridine-3'-phosphorothioate
  modified_base 2: mod_base = OTHER; note = 2'-deoxy-2'-fluorouridine-3'-phosphorothioate
  modified_base 3: mod_base = OTHER; note = 2'-O-methyluridine-3'-phosphate
  modified_base 4: mod_base = OTHER; note = 2'-deoxy-2'-fluorouridine-3'-phosphate
  modified_base 5: mod_base = OTHER; note = 2'-O-methylcytidine-3'-phosphate
  modified_base 6: mod_base = OTHER; note = 2'-deoxy-2'-fluorocytidine-3'-phosphate
  modified_base 7: mod_base = OTHER; note = 2'-O-methyladenosine-3'-phosphate
  modified_base 8: mod_base = OTHER; note = 2'-deoxy-2'-fluorouridine-3'-phosphate
  modified_base 9: mod_base = OTHER; note = 2'-O-methyladenosine-3'-phosphate
  modified_base 10: mod_base = OTHER; note = 2'-deoxy-2'-fluorouridine-3'-phosphate
  modified_base 11: mod_base = OTHER; note = 2'-O-methylcytidine-3'-phosphate
  modified_base 12: mod_base = OTHER; note = 2'-O-methylcytidine-3'-phosphate
  modified_base 13: mod_base = OTHER; note = 2'-O-methyluridine-3'-phosphate
  modified_base 14: mod_base = OTHER; note = 2'-deoxy-2'-fluorouridine-3'-phosphate
  modified_base 15: mod_base = OTHER; note = 2'-O-methylguanosine-3'-phosphate
  modified_base 16: mod_base = OTHER; note = 2'-deoxy-2'-fluoroadenosine-3'-phosphate
  modified_base 17: mod_base = OTHER; note = 2'-O-methylcytidine-3'-phosphate
  modified_base 18: mod_base = OTHER; note = 2'-deoxy-2'-fluorouridine-3'-phosphate
  modified_base 19: mod_base = OTHER; note = 2'-O-methyluridine-3'-phosphate
  modified_base 20: mod_base = OTHER; note = 2'-deoxy-2'-fluorouridine-3'-phosphate
  modified_base 21: mod_base = OTHER; note = 2'-O-methylguanosine-3'-phosphorothioate
  modified_base 22: mod_base = OTHER; note = 2'-O-methyladenosine-3'-phosphorothioate
  modified_base 23: mod_base = OTHER; note = 2'-O-methyladenosine
ttttccatatccttgactttgaa

SEQ ID NO: 185 - RNA, 23 nt, synthetic construct
  source 1..23: mol_type = other RNA
  modified_base 1: mod_base = OTHER; note = 2'-O-methyladenosine-3'-phosphorothioate
  modified_base 2: mod_base = OTHER; note = 2'-deoxy-2'-fluoroadenosine-3'-phosphorothioate
  modified_base 3: mod_base = OTHER; note = 2'-O-methylcytidine-3'-phosphate
  modified_base 4: mod_base = OTHER; note = 2'-deoxy-2'-fluoroguanosine-3'-phosphate
  modified_base 5: mod_base = OTHER; note = 2'-O-methyladenosine-3'-phosphate
  modified_base 6: mod_base = OTHER; note = 2'-deoxy-2'-fluorocytidine-3'-phosphate
  modified_base 7: mod_base = OTHER; note = 2'-O-methyluridine-3'-phosphate
  modified_base 8: mod_base = OTHER; note = 2'-deoxy-2'-fluorouridine-3'-phosphate
  modified_base 9: mod_base = OTHER; note = 2'-O-methylcytidine-3'-phosphate
  modified_base 10: mod_base = OTHER; note = 2'-deoxy-2'-fluorouridine-3'-phosphate
  modified_base 11: mod_base = OTHER; note = 2'-O-methylcytidine-3'-phosphate
  modified_base 12: mod_base = OTHER; note = 2'-O-methyluridine-3'-phosphate
  modified_base 13: mod_base = OTHER; note = 2'-O-methyluridine-3'-phosphate
  modified_base 14: mod_base = OTHER; note = 2'-deoxy-2'-fluoroguanosine-3'-phosphate
  modified_base 15: mod_base = OTHER; note = 2'-O-methyluridine-3'-phosphate
  modified_base 16: mod_base = OTHER; note = 2'-deoxy-2'-fluoroguanosine-3'-phosphate
  modified_base 17: mod_base = OTHER; note = 2'-O-methyladenosine-3'-phosphate
  modified_base 18: mod_base = OTHER; note = 2'-deoxy-2'-fluoroadenosine-3'-phosphate
  modified_base 19: mod_base = OTHER; note = 2'-O-methylcytidine-3'-phosphate
  modified_base 20: mod_base = OTHER; note = 2'-deoxy-2'-fluorouridine-3'-phosphate
  modified_base 21: mod_base = OTHER; note = 2'-O-methyladenosine-3'-phosphorothioate
  modified_base 22: mod_base = OTHER; note = 2'-O-methyluridine-3'-phosphorothioate
  modified_base 23: mod_base = OTHER; note = 2'-O-methylcytidine
aacgacttctcttgtgaactatc

SEQ ID NO: 186 - RNA, 23 nt, synthetic construct
  source 1..23: mol_type = other RNA
  modified_base 1: mod_base = OTHER; note = 2'-O-methylcytidine-3'-phosphorothioate
  modified_base 2: mod_base = OTHER; note = 2'-deoxy-2'-fluorouridine-3'-phosphorothioate
  modified_base 3: mod_base = OTHER; note = 2'-O-methyluridine-3'-phosphate
  modified_base 4: mod_base = OTHER; note = 2'-deoxy-2'-fluoroguanosine-3'-phosphate
  modified_base 5: mod_base = OTHER; note = 2'-O-methyluridine-3'-phosphate
  modified_base 6: mod_base = OTHER; note = 2'-deoxy-2'-fluoroguanosine-3'-phosphate
  modified_base 7: mod_base = OTHER; note = 2'-O-methyladenosine-3'-phosphate
  modified_base 8: mod_base = OTHER; note = 2'-deoxy-2'-fluoroadenosine-3'-phosphate
  modified_base 9: mod_base = OTHER; note = 2'-O-methylcytidine-3'-phosphate
  modified_base 10: mod_base = OTHER; note = 2'-deoxy-2'-fluorouridine-3'-phosphate
  modified_base 11: mod_base = OTHER; note = 2'-O-methyladenosine-3'-phosphate
  modified_base 12: mod_base = OTHER; note = 2'-O-methyluridine-3'-phosphate
  modified_base 13: mod_base = OTHER; note = 2'-O-methylcytidine-3'-phosphate
  modified_base 14: mod_base = OTHER; note = 2'-deoxy-2'-fluoroadenosine-3'-phosphate
  modified_base 15: mod_base = OTHER; note = 2'-O-methyladenosine-3'-phosphate
  modified_base 16: mod_base = OTHER; note = 2'-deoxy-2'-fluoroguanosine-3'-phosphate
  modified_base 17: mod_base = OTHER; note = 2'-O-methylguanosine-3'-phosphate
  modified_base 18: mod_base = OTHER; note = 2'-deoxy-2'-fluoroguanosine-3'-phosphate
  modified_base 19: mod_base = OTHER; note = 2'-O-methylguanosine-3'-phosphate
  modified_base 20: mod_base = OTHER; note = 2'-deoxy-2'-fluorocytidine-3'-phosphate
  modified_base 21: mod_base = OTHER; note = 2'-O-methylcytidine-3'-phosphorothioate
  modified_base 22: mod_base = OTHER; note = 2'-O-methylguanosine-3'-phosphorothioate
  modified_base 23: mod_base = OTHER; note = 2'-O-methylcytidine
cttgtgaactatcaaggggccgc

SEQ ID NO: 187 - RNA, 23 nt, synthetic construct
  source 1..23: mol_type = other RNA
  modified_base 1: mod_base = OTHER; note = 2'-O-methyluridine-3'-phosphorothioate
  modified_base 2: mod_base = OTHER; note = 2'-deoxy-2'-fluoroguanosine-3'-phosphorothioate
  modified_base 3: mod_base = OTHER; note = 2'-O-methyluridine-3'-phosphate
  modified_base 4: mod_base = OTHER; note = 2'-deoxy-2'-fluorocytidine-3'-phosphate
  modified_base 5: mod_base = OTHER; note = 2'-O-methyluridine-3'-phosphate
  modified_base 6: mod_base = OTHER; note = 2'-deoxy-2'-fluoroguanosine-3'-phosphate
  modified_base 7: mod_base = OTHER; note = 2'-O-methyladenosine-3'-phosphate
  modified_base 8: mod_base = OTHER; note = 2'-deoxy-2'-fluorouridine-3'-phosphate
  modified_base 9: mod_base = OTHER; note = 2'-O-methylcytidine-3'-phosphate
  modified_base 10: mod_base = OTHER; note = 2'-deoxy-2'-fluorocytidine-3'-phosphate
  modified_base 11: mod_base = OTHER; note = 2'-O-methyladenosine-3'-phosphate
  modified_base 12: mod_base = OTHER; note = 2'-O-methyluridine-3'-phosphate
  modified_base 13: mod_base = OTHER; note = 2'-O-methylcytidine-3'-phosphate
  modified_base 14: mod_base = OTHER; note = 2'-deoxy-2'-fluorouridine-3'-phosphate
  modified_base 15: mod_base = OTHER; note = 2'-O-methyladenosine-3'-phosphate
  modified_base 16: mod_base = OTHER; note = 2'-deoxy-2'-fluoroguanosine-3'-phosphate
  modified_base 17: mod_base = OTHER; note = 2'-O-methylcytidine-3'-phosphate
  modified_base 18: mod_base = OTHER; note = 2'-deoxy-2'-fluoroadenosine-3'-phosphate
  modified_base 19: mod_base = OTHER; note = 2'-O-methylcytidine-3'-phosphate
  modified_base 20: mod_base = OTHER; note = 2'-deoxy-2'-fluorocytidine-3'-phosphate
  modified_base 21: mod_base = OTHER; note = 2'-O-methyladenosine-3'-phosphorothioate
  modified_base 22: mod_base = OTHER; note = 2'-O-methylguanosine-3'-phosphorothioate
  modified_base 23: mod_base = OTHER; note = 2'-O-methylguanosine
tgtctgatccatctagcaccagg

SEQ ID NO: 188 - RNA, 23 nt, synthetic construct
  source 1..23: mol_type = other RNA
  modified_base 1: mod_base = OTHER; note = 2'-O-methyladenosine-3'-phosphorothioate
  modified_base 2: mod_base = OTHER; note = 2'-deoxy-2'-fluorouridine-3'-phosphorothioate
  modified_base 3: mod_base = OTHER; note = 2'-O-methylguanosine-3'-phosphate
  modified_base 4: mod_base = OTHER; note = 2'-deoxy-2'-fluorocytidine-3'-phosphate
  modified_base 5: mod_base = OTHER; note = 2'-O-methyluridine-3'-phosphate
  modified_base 6: mod_base = OTHER; note = 2'-deoxy-2'-fluoroguanosine-3'-phosphate
  modified_base 7: mod_base = OTHER; note = 2'-O-methyluridine-3'-phosphate
  modified_base 8: mod_base = OTHER; note = 2'-deoxy-2'-fluorocytidine-3'-phosphate
  modified_base 9: mod_base = OTHER; note = 2'-O-methyluridine-3'-phosphate
  modified_base 10: mod_base = OTHER; note = 2'-deoxy-2'-fluoroguanosine-3'-phosphate
  modified_base 11: mod_base = OTHER; note = 2'-O-methyladenosine-3'-phosphate
  modified_base 12: mod_base = OTHER; note = 2'-O-methyluridine-3'-phosphate
  modified_base 13: mod_base = OTHER; note = 2'-O-methylcytidine-3'-phosphate
  modified_base 14: mod_base = OTHER; note = 2'-deoxy-2'-fluorocytidine-3'-phosphate
  modified_base 15: mod_base = OTHER; note = 2'-O-methyladenosine-3'-phosphate
  modified_base 16: mod_base = OTHER; note = 2'-deoxy-2'-fluorouridine-3'-phosphate
  modified_base 17: mod_base = OTHER; note = 2'-O-methylcytidine-3'-phosphate
  modified_base 18: mod_base = OTHER; note = 2'-deoxy-2'-fluorouridine-3'-phosphate
  modified_base 19: mod_base = OTHER; note = 2'-O-methyladenosine-3'-phosphate
  modified_base 20: mod_base = OTHER; note = 2'-deoxy-2'-fluoroguanosine-3'-phosphate
  modified_base 21: mod_base = OTHER; note = 2'-O-methylcytidine-3'-phosphorothioate
  modified_base 22: mod_base = OTHER; note = 2'-O-methyladenosine-3'-phosphorothioate
  modified_base 23: mod_base = OTHER; note = 2'-O-methylcytidine
atgctgtctgatccatctagcac

SEQ ID NO: 189 - RNA, 23 nt, synthetic construct
  source 1..23: mol_type = other RNA
  modified_base 1: mod_base = OTHER; note = 2'-O-methyluridine-3'-phosphorothioate
  modified_base 2: mod_base = OTHER; note = 2'-deoxy-2'-fluoroguanosine-3'-phosphorothioate
  modified_base 3: mod_base = OTHER; note = 2'-O-methyladenosine-3'-phosphate
  modified_base 4: mod_base = OTHER; note = 2'-deoxy-2'-fluorouridine-3'-phosphate
  modified_base 5: mod_base = OTHER; note = 2'-O-methylcytidine-3'-phosphate
  modified_base 6: mod_base = OTHER; note = 2'-deoxy-2'-fluorocytidine-3'-phosphate
  modified_base 7: mod_base = OTHER; note = 2'-O-methyladenosine-3'-phosphate
  modified_base 8: mod_base = OTHER; note = 2'-deoxy-2'-fluorouridine-3'-phosphate
  modified_base 9: mod_base = OTHER; note = 2'-O-methylcytidine-3'-phosphate
  modified_base 10: mod_base = OTHER; note = 2'-deoxy-2'-fluorouridine-3'-phosphate
  modified_base 11: mod_base = OTHER; note = 2'-O-methyladenosine-3'-phosphate
  modified_base 12: mod_base = OTHER; note = 2'-O-methylguanosine-3'-phosphate
  modified_base 13: mod_base = OTHER; note = 2'-O-methylcytidine-3'-phosphate
  modified_base 14: mod_base = OTHER; note = 2'-deoxy-2'-fluoroadenosine-3'-phosphate
  modified_base 15: mod_base = OTHER; note = 2'-O-methylcytidine-3'-phosphate
  modified_base 16: mod_base = OTHER; note = 2'-deoxy-2'-fluorocytidine-3'-phosphate
  modified_base 17: mod_base = OTHER; note = 2'-O-methyladenosine-3'-phosphate
  modified_base 18: mod_base = OTHER; note = 2'-deoxy-2'-fluoroguanosine-3'-phosphate
  modified_base 19: mod_base = OTHER; note = 2'-O-methylguanosine-3'-phosphate
  modified_base 20: mod_base = OTHER; note = 2'-deoxy-2'-fluorouridine-3'-phosphate
  modified_base 21: mod_base = OTHER; note = 2'-O-methyladenosine-3'-phosphorothioate
  modified_base 22: mod_base = OTHER; note = 2'-O-methylguanosine-3'-phosphorothioate
  modified_base 23: mod_base = OTHER; note = 2'-O-methyladenosine
tgatccatctagcaccaggtaga

SEQ ID NO: 190 - RNA, 23 nt, synthetic construct
  source 1..23: mol_type = other RNA
  modified_base 1: mod_base = OTHER; note = 2'-O-methyluridine-3'-phosphorothioate
  modified_base 2: mod_base = OTHER; note = 2'-deoxy-2'-fluorouridine-3'-phosphorothioate
  modified_base 3: mod_base = OTHER; note = 2'-O-methylguanosine-3'-phosphate
  modified_base 4: mod_base = OTHER; note = 2'-deoxy-2'-fluorouridine-3'-phosphate
  modified_base 5: mod_base = OTHER; note = 2'-O-methylcytidine-3'-phosphate
  modified_base 6: mod_base = OTHER; note = 2'-deoxy-2'-fluorouridine-3'-phosphate
  modified_base 7: mod_base = OTHER; note = 2'-O-methylguanosine-3'-phosphate
  modified_base 8: mod_base = OTHER; note = 2'-deoxy-2'-fluoroadenosine-3'-phosphate
  modified_base 9: mod_base = OTHER; note = 2'-O-methyluridine-3'-phosphate
  modified_base 10: mod_base = OTHER; note = 2'-deoxy-2'-fluorocytidine-3'-phosphate
  modified_base 11: mod_base = OTHER; note = 2'-O-methylcytidine-3'-phosphate
  modified_base 12: mod_base = OTHER; note = 2'-O-methyladenosine-3'-phosphate
  modified_base 13: mod_base = OTHER; note = 2'-O-methyluridine-3'-phosphate
  modified_base 14: mod_base = OTHER; note = 2'-deoxy-2'-fluorocytidine-3'-phosphate
  modified_base 15: mod_base = OTHER; note = 2'-O-methyluridine-3'-phosphate
  modified_base 16: mod_base = OTHER; note = 2'-deoxy-2'-fluoroadenosine-3'-phosphate
  modified_base 17: mod_base = OTHER; note = 2'-O-methylguanosine-3'-phosphate
  modified_base 18: mod_base = OTHER; note = 2'-deoxy-2'-fluorocytidine-3'-phosphate
  modified_base 19: mod_base = OTHER; note = 2'-O-methyladenosine-3'-phosphate
  modified_base 20: mod_base = OTHER; note = 2'-deoxy-2'-fluorocytidine-3'-phosphate
  modified_base 21: mod_base = OTHER; note = 2'-O-methylcytidine-3'-phosphorothioate
  modified_base 22: mod_base = OTHER; note = 2'-O-methyladenosine-3'-phosphorothioate
  modified_base 23: mod_base = OTHER; note = 2'-O-methylguanosine
ttgtctgatccatctagcaccag

SEQ ID NO: 191 - RNA, 23 nt, synthetic construct
  source 1..23: mol_type = other RNA
  modified_base 1: mod_base = OTHER; note = 2'-O-methyladenosine-3'-phosphorothioate
  modified_base 2: mod_base = OTHER; note = 2'-deoxy-2'-fluorocytidine-3'-phosphorothioate
  modified_base 3: mod_base = OTHER; note = 2'-O-methylcytidine-3'-phosphate
  modified_base 4: mod_base = OTHER; note = 2'-deoxy-2'-fluoroadenosine-3'-phosphate
  modified_base 5: mod_base = OTHER; note = 2'-O-methyluridine-3'-phosphate
  modified_base 6: mod_base = OTHER; note = 2'-deoxy-2'-fluoroguanosine-3'-phosphate
  modified_base 7: mod_base = OTHER; note = 2'-O-methylcytidine-3'-phosphate
  modified_base 8: mod_base = OTHER; note = 2'-deoxy-2'-fluorocytidine-3'-phosphate
  modified_base 9: mod_base = OTHER; note = 2'-O-methyladenosine-3'-phosphate
  modified_base 10: mod_base = OTHER; note = 2'-deoxy-2'-fluorocytidine-3'-phosphate
  modified_base 11: mod_base = OTHER; note = 2'-O-methyladenosine-3'-phosphate
  modified_base 12: mod_base = OTHER; note = 2'-O-methylguanosine-3'-phosphate
  modified_base 13: mod_base = OTHER; note = 2'-O-methyladenosine-3'-phosphate
  modified_base 14: mod_base = OTHER; note = 2'-deoxy-2'-fluoroguanosine-3'-phosphate
  modified_base 15: mod_base = OTHER; note = 2'-O-methyladenosine-3'-phosphate
  modified_base 16: mod_base = OTHER; note = 2'-deoxy-2'-fluorocytidine-3'-phosphate
  modified_base 17: mod_base = OTHER; note = 2'-O-methyluridine-3'-phosphate
  modified_base 18: mod_base = OTHER; note = 2'-deoxy-2'-fluorocytidine-3'-phosphate
  modified_base 19: mod_base = OTHER; note = 2'-O-methyladenosine-3'-phosphate
  modified_base 20: mod_base = OTHER; note = 2'-deoxy-2'-fluoroguanosine-3'-phosphate
  modified_base 21: mod_base = OTHER; note = 2'-O-methyladenosine-3'-phosphorothioate
  modified_base 22: mod_base = OTHER; note = 2'-O-methylguanosine-3'-phosphorothioate
  modified_base 23: mod_base = OTHER; note = 2'-O-methyladenosine
accatgccacagagactcagaga

SEQ ID NO: 192 - RNA, 23 nt, synthetic construct
  source 1..23: mol_type = other RNA
  modified_base 1: mod_base = OTHER; note = 2'-O-methyluridine-3'-phosphorothioate
  modified_base 2: mod_base = OTHER; note = 2'-deoxy-2'-fluorocytidine-3'-phosphorothioate
  modified_base 3: mod_base = OTHER; note = 2'-O-methyluridine-3'-phosphate
  modified_base 4: mod_base = OTHER; note = 2'-deoxy-2'-fluoroguanosine-3'-phosphate
  modified_base 5: mod_base = OTHER; note = 2'-O-methyluridine-3'-phosphate
  modified_base 6: mod_base = OTHER; note = 2'-deoxy-2'-fluorocytidine-3'-phosphate
  modified_base 7: mod_base = OTHER; note = 2'-O-methyluridine-3'-phosphate
  modified_base 8: mod_base = OTHER; note = 2'-deoxy-2'-fluoroguanosine-3'-phosphate
  modified_base 9: mod_base = OTHER; note = 2'-O-methyladenosine-3'-phosphate
  modified_base 10: mod_base = OTHER; note = 2'-deoxy-2'-fluorouridine-3'-phosphate
  modified_base 11: mod_base = OTHER; note = 2'-O-methylcytidine-3'-phosphate
  modified_base 12: mod_base = OTHER; note = 2'-O-methylcytidine-3'-phosphate
  modified_base 13: mod_base = OTHER; note = 2'-O-methyladenosine-3'-phosphate
  modified_base 14: mod_base = OTHER; note = 2'-deoxy-2'-fluorouridine-3'-phosphate
  modified_base 15: mod_base = OTHER; note = 2'-O-methylcytidine-3'-phosphate
  modified_base 16: mod_base = OTHER; note = 2'-deoxy-2'-fluorouridine-3'-phosphate
  modified_base 17: mod_base = OTHER; note = 2'-O-methyladenosine-3'-phosphate
  modified_base 18: mod_base = OTHER; note = 2'-deoxy-2'-fluoroguanosine-3'-phosphate
  modified_base 19: mod_base = OTHER; note = 2'-O-methylcytidine-3'-phosphate
  modified_base 20: mod_base = OTHER; note = 2'-deoxy-2'-fluoroadenosine-3'-phosphate
  modified_base 21: mod_base = OTHER; note = 2'-O-methylcytidine-3'-phosphorothioate
  modified_base 22: mod_base = OTHER; note = 2'-O-methylcytidine-3'-phosphorothioate
  modified_base 23: mod_base = OTHER; note = 2'-O-methyladenosine
tctgtctgatccatctagcacca

SEQ ID NO: 193 - RNA, 23 nt, synthetic construct
  source 1..23: mol_type = other RNA
  modified_base 1: mod_base = OTHER; note = 2'-O-methyluridine-3'-phosphorothioate
  modified_base 2: mod_base = OTHER; note = 2'-deoxy-2'-fluoroadenosine-3'-phosphorothioate
  modified_base 3: mod_base = OTHER; note = 2'-O-methyluridine-3'-phosphate
  modified_base 4: mod_base = OTHER; note = 2'-deoxy-2'-fluorocytidine-3'-phosphate
  modified_base 5: mod_base = OTHER; note = 2'-O-methylcytidine-3'-phosphate
  modified_base 6: mod_base = OTHER; note = 2'-deoxy-2'-fluoroadenosine-3'-phosphate
  modified_base 7: mod_base = OTHER; note = 2'-O-methyluridine-3'-phosphate
  modified_base 8: mod_base = OTHER; note = 2'-deoxy-2'-fluorocytidine-3'-phosphate
  modified_base 9: mod_base = OTHER; note = 2'-O-methyluridine-3'-phosphate
  modified_base 10: mod_base = OTHER; note = 2'-deoxy-2'-fluoroadenosine-3'-phosphate
  modified_base 11: mod_base = OTHER; note = 2'-O-methylguanosine-3'-phosphate
  modified_base 12: mod_base = OTHER; note = 2'-O-methylcytidine-3'-phosphate
  modified_base 13: mod_base = OTHER; note = 2'-O-methyladenosine-3'-phosphate
  modified_base 14: mod_base = OTHER; note = 2'-deoxy-2'-fluorocytidine-3'-phosphate
  modified_base 15: mod_base = OTHER; note = 2'-O-methylcytidine-3'-phosphate
  modified_base 16: mod_base = OTHER; note = 2'-deoxy-2'-fluoroadenosine-3'-phosphate
  modified_base 17: mod_base = OTHER; note = 2'-O-methylguanosine-3'-phosphate
  modified_base 18: mod_base = OTHER; note = 2'-deoxy-2'-fluoroguanosine-3'-phosphate
  modified_base 19: mod_base = OTHER; note = 2'-O-methyluridine-3'-phosphate
  modified_base 20: mod_base = OTHER; note = 2'-deoxy-2'-fluoroadenosine-3'-phosphate
  modified_base 21: mod_base = OTHER; note = 2'-O-methylguanosine-3'-phosphorothioate
  modified_base 22: mod_base = OTHER; note = 2'-O-methyladenosine-3'-phosphorothioate
  modified_base 23: mod_base = OTHER; note = 2'-O-methyluridine
tatccatctagcaccaggtagat

SEQ ID NO: 194 - RNA, 23 nt, synthetic construct
  source 1..23: mol_type = other RNA
  modified_base 1: mod_base = OTHER; note = 2'-O-methyluridine-3'-phosphorothioate
  modified_base 2: mod_base = OTHER; note = 2'-deoxy-2'-fluorouridine-3'-phosphorothioate
  modified_base 3: mod_base = OTHER; note = 2'-O-methylguanosine-3'-phosphate
  modified_base 4: mod_base = OTHER; note = 2'-deoxy-2'-fluoroadenosine-3'-phosphate
  modified_base 5: mod_base = OTHER; note = 2'-O-methyluridine-3'-phosphate
  modified_base 6: mod_base = OTHER; note = 2'-deoxy-2'-fluorocytidine-3'-phosphate
  modified_base 7: mod_base = OTHER; note = 2'-O-methylcytidine-3'-phosphate
  modified_base 8: mod_base = OTHER; note = 2'-deoxy-2'-fluoroadenosine-3'-phosphate
  modified_base 9: mod_base = OTHER; note = 2'-O-methyluridine-3'-phosphate
  modified_base 10: mod_base = OTHER; note = 2'-deoxy-2'-fluorocytidine-3'-phosphate
  modified_base 11: mod_base = OTHER; note = 2'-O-methyluridine-3'-phosphate
  modified_base 12: mod_base = OTHER; note = 2'-O-methyladenosine-3'-phosphate
  modified_base 13: mod_base = OTHER; note = 2'-O-methylguanosine-3'-phosphate
  modified_base 14: mod_base = OTHER; note = 2'-deoxy-2'-fluorocytidine-3'-phosphate
  modified_base 15: mod_base = OTHER; note = 2'-O-methyladenosine-3'-phosphate
  modified_base 16: mod_base = OTHER; note = 2'-deoxy-2'-fluorocytidine-3'-phosphate
  modified_base 17: mod_base = OTHER; note = 2'-O-methylcytidine-3'-phosphate
  modified_base 18: mod_base = OTHER; note = 2'-deoxy-2'-fluoroadenosine-3'-phosphate
  modified_base 19: mod_base = OTHER; note = 2'-O-methylguanosine-3'-phosphate
  modified_base 20: mod_base = OTHER; note = 2'-deoxy-2'-fluoroguanosine-3'-phosphate
  modified_base 21: mod_base = OTHER; note = 2'-O-methyluridine-3'-phosphorothioate
  modified_base 22: mod_base = OTHER; note = 2'-O-methyladenosine-3'-phosphorothioate
  modified_base 23: mod_base = OTHER; note = 2'-O-methylguanosine
ttgatccatctagcaccaggtag

SEQ ID NO: 195 - RNA, 21 nt, synthetic construct
  source 1..21: mol_type = other RNA
  modified_base 1: mod_base = OTHER; note = 2'-deoxy-2'-fluoroguanosine-3'-phosphorothioate
  modified_base 2: mod_base = OTHER; note = 2'-O-methylcytidine-3'-phosphorothioate
  modified_base 3: mod_base = OTHER; note = 2'-deoxy-2'-fluoroadenosine-3'-phosphate
  modified_base 4: mod_base = OTHER; note = 2'-O-methyladenosine-3'-phosphate
  modified_base 5: mod_base = OTHER; note = 2'-deoxy-2'-fluoroguanosine-3'-phosphate
  modified_base 6: mod_base = OTHER; note = 2'-O-methylcytidine-3'-phosphate
  modified_base 7: mod_base = OTHER; note = 2'-deoxy-2'-fluorocytidine-3'-phosphate
  modified_base 8: mod_base = OTHER; note = 2'-O-methyladenosine-3'-phosphate
  modified_base 9: mod_base = OTHER; note = 2'-deoxy-2'-fluoroadenosine-3'-phosphate
  modified_base 10: mod_base = OTHER; note = 2'-deoxy-2'-fluoroguanosine-3'-phosphate
  modified_base 11: mod_base = OTHER; note = 2'-deoxy-2'-fluoroadenosine-3'-phosphate
  modified_base 12: mod_base = OTHER; note = 2'-O-methyluridine-3'-phosphate
  modified_base 13: mod_base = OTHER; note = 2'-deoxy-2'-fluorocytidine-3'-phosphate
  modified_base 14: mod_base = OTHER; note = 2'-O-methyluridine-3'-phosphate
  modified_base 15: mod_base = OTHER; note = 2'-deoxy-2'-fluorocytidine-3'-phosphate
  modified_base 16: mod_base = OTHER; note = 2'-O-methyladenosine-3'-phosphate
  modified_base 17: mod_base = OTHER; note = 2'-deoxy-2'-fluoroguanosine-3'-phosphate
  modified_base 18: mod_base = OTHER; note = 2'-O-methyluridine-3'-phosphate
  modified_base 19: mod_base = OTHER; note = 2'-deoxy-2'-fluorocytidine-3'-phosphate
  modified_base 20: mod_base = OTHER; note = 2'-O-methyladenosine-3'-phosphate
  modified_base 21: mod_base = OTHER; note = 2'-deoxy-2'-fluorocytidine-3'-phosphate ((2S,4R)-1-[29-[[2-(acetylamino)-2-deoxy-beta-D-galactopyra nosyl]oxy]-14,14-bis[[3-[[3-[[5-[[2-(acetylamino)-2-deoxy-b eta-D-galactopyranosyl]oxy]-1-oxopentyl]amino]propyl]amino] -3-oxopropoxy]methyl]-1,12,19,25-tetraoxo-16-oxa-13,20,24-t riazanonacos-1-yl]-4-hydroxy-2-pyrrolidinyl)methyl ester
gcaagccaagatctcagtcac

SEQ ID NO: 196 - RNA, 21 nt, synthetic construct
  source 1..21: mol_type = other RNA
  modified_base 1: mod_base = OTHER; note = 2'-deoxy-2'-fluoroguanosine-3'-phosphorothioate
  modified_base 2: mod_base = OTHER; note = 2'-O-methyladenosine-3'-phosphorothioate
  modified_base 3: mod_base = OTHER; note = 2'-deoxy-2'-fluorouridine-3'-phosphate
  modified_base 4: mod_base = OTHER; note = 2'-O-methyluridine-3'-phosphate
  modified_base 5: mod_base = OTHER; note = 2'-deoxy-2'-fluoroguanosine-3'-phosphate
  modified_base 6: mod_base = OTHER; note = 2'-O-methyladenosine-3'-phosphate
  modified_base 7: mod_base = OTHER; note = 2'-deoxy-2'-fluoroguanosine-3'-phosphate
  modified_base 8: mod_base = OTHER; note = 2'-O-methyladenosine-3'-phosphate
  modified_base 9: mod_base = OTHER; note = 2'-deoxy-2'-fluoroadenosine-3'-phosphate
  modified_base 10: mod_base = OTHER; note = 2'-deoxy-2'-fluoroguanosine-3'-phosphate
  modified_base 11: mod_base = OTHER; note = 2'-deoxy-2'-fluoroguanosine-3'-phosphate
  modified_base 12: mod_base = OTHER; note = 2'-O-methyluridine-3'-phosphate
  modified_base 13: mod_base = OTHER; note = 2'-deoxy-2'-fluoroguanosine-3'-phosphate
  modified_base 14: mod_base = OTHER; note = 2'-O-methylguanosine-3'-phosphate
  modified_base 15: mod_base = OTHER; note = 2'-deoxy-2'-fluorocytidine-3'-phosphate
  modified_base 16: mod_base = OTHER; note = 2'-O-methylguanosine-3'-phosphate
  modified_base 17: mod_base = OTHER; note = 2'-deoxy-2'-fluoroadenosine-3'-phosphate
  modified_base 18: mod_base = OTHER; note = 2'-O-methylguanosine-3'-phosphate
  modified_base 19: mod_base = OTHER; note = 2'-deoxy-2'-fluorouridine-3'-phosphate
  modified_base 20: mod_base = OTHER; note = 2'-O-methyluridine-3'-phosphate
  modified_base 21: mod_base = OTHER; note = 2'-deoxy-2'-fluoroadenosine-3'-phosphate ((2S,4R)-1-[29-[[2-(acetylamino)-2-deoxy-beta-D-galactopyra nosyl]oxy]-14,14-bis[[3-[[3-[[5-[[2-(acetylamino)-2-deoxy-b eta-D-galactopyranosyl]oxy]-1-oxopentyl]amino]propyl]amino] -3-oxopropoxy]methyl]-1,12,19,25-tetraoxo-16-oxa-13,20,24-t riazanonacos-1-yl]-4-hydroxy-2-pyrrolidinyl)methyl ester
gattgagaaggtggcgagtta

SEQ ID NO: 197 - RNA, 21 nt, synthetic construct
  source 1..21: mol_type = other RNA
  modified_base 1: mod_base = OTHER; note = 2'-deoxy-2'-fluorocytidine-3'-phosphorothioate
  modified_base 2: mod_base = OTHER; note = 2'-O-methyladenosine-3'-phosphorothioate
  modified_base 3: mod_base = OTHER; note = 2'-deoxy-2'-fluorocytidine-3'-phosphate
  modified_base 4: mod_base = OTHER; note = 2'-O-methyladenosine-3'-phosphate
  modified_base 5: mod_base = OTHER; note = 2'-deoxy-2'-fluoroadenosine-3'-phosphate
  modified_base 6: mod_base = OTHER; note = 2'-O-methylguanosine-3'-phosphate
  modified_base 7: mod_base = OTHER; note = 2'-deoxy-2'-fluoroadenosine-3'-phosphate
  modified_base 8: mod_base = OTHER; note = 2'-O-methylguanosine-3'-phosphate
  modified_base 9: mod_base = OTHER; note = 2'-deoxy-2'-fluoroadenosine-3'-phosphate
  modified_base 10: mod_base = OTHER; note = 2'-deoxy-2'-fluoroadenosine-3'-phosphate
  modified_base 11: mod_base = OTHER; note = 2'-deoxy-2'-fluoroguanosine-3'-phosphate
  modified_base 12: mod_base = OTHER; note = 2'-O-methylcytidine-3'-phosphate
  modified_base 13: mod_base = OTHER; note = 2'-deoxy-2'-fluorocytidine-3'-phosphate
  modified_base 14: mod_base = OTHER; note = 2'-O-methylguanosine-3'-phosphate
  modified_base 15: mod_base = OTHER; note = 2'-deoxy-2'-fluorocytidine-3'-phosphate
  modified_base 16: mod_base = OTHER; note = 2'-O-methyluridine-3'-phosphate
  modified_base 17: mod_base = OTHER; note = 2'-deoxy-2'-fluorouridine-3'-phosphate
  modified_base 18: mod_base = OTHER; note = 2'-O-methylcytidine-3'-phosphate
  modified_base 19: mod_base = OTHER; note = 2'-deoxy-2'-fluoroadenosine-3'-phosphate
  modified_base 20: mod_base = OTHER; note = 2'-O-methyluridine-3'-phosphate
  modified_base 21: mod_base = OTHER; note = 2'-deoxy-2'-fluorouridine-3'-phosphate ((2S,4R)-1-[29-[[2-(acetylamino)-2-deoxy-beta-D-galactopyra nosyl]oxy]-14,14-bis[[3-[[3-[[5-[[2-(acetylamino)-2-deoxy-b eta-D-galactopyranosyl]oxy]-1-oxopentyl]amino]propyl]amino] -3-oxopropoxy]methyl]-1,12,19,25-tetraoxo-16-oxa-13,20,24-t riazanonacos-1-yl]-4-hydroxy-2-pyrrolidinyl)methyl ester
cacaagagaagccgcttcatt

SEQ ID NO: 198 - RNA, 21 nt, synthetic construct
  source 1..21: mol_type = other RNA
  modified_base 1: mod_base = OTHER; note = 2'-deoxy-2'-fluorouridine-3'-phosphorothioate
  modified_base 2: mod_base = OTHER; note = 2'-O-methyluridine-3'-phosphorothioate
  modified_base 3: mod_base = OTHER; note = 2'-deoxy-2'-fluoroguanosine-3'-phosphate
  modified_base 4: mod_base = OTHER; note = 2'-O-methyluridine-3'-phosphate
  modified_base 5: mod_base = OTHER; note = 2'-deoxy-2'-fluoroguanosine-3'-phosphate
  modified_base 6: mod_base = OTHER; note = 2'-O-methyladenosine-3'-phosphate
  modified_base 7: mod_base = OTHER; note = 2'-deoxy-2'-fluoroguanosine-3'-phosphate
  modified_base 8: mod_base = OTHER; note = 2'-O-methyladenosine-3'-phosphate
  modified_base 9: mod_base = OTHER; note = 2'-deoxy-2'-fluoroguanosine-3'-phosphate
  modified_base 10: mod_base = OTHER; note = 2'-deoxy-2'-fluoroadenosine-3'-phosphate
  modified_base 11: mod_base = OTHER; note = 2'-deoxy-2'-fluoroguanosine-3'-phosphate
  modified_base 12: mod_base = OTHER; note = 2'-O-methyladenosine-3'-phosphate
  modified_base 13: mod_base = OTHER; note = 2'-deoxy-2'-fluorouridine-3'-phosphate
  modified_base 14: mod_base = OTHER; note = 2'-O-methylguanosine-3'-phosphate
  modified_base 15: mod_base = OTHER; note = 2'-deoxy-2'-fluorocytidine-3'-phosphate
  modified_base 16: mod_base = OTHER; note = 2'-O-methyluridine-3'-phosphate
  modified_base 17: mod_base = OTHER; note = 2'-deoxy-2'-fluoroadenosine-3'-phosphate
  modified_base 18: mod_base = OTHER; note = 2'-O-methylcytidine-3'-phosphate
  modified_base 19: mod_base = OTHER; note = 2'-deoxy-2'-fluoroadenosine-3'-phosphate
  modified_base 20: mod_base = OTHER; note = 2'-O-methyladenosine-3'-phosphate
  modified_base 21: mod_base = OTHER; note = 2'-deoxy-2'-fluoroadenosine-3'-phosphate ((2S,4R)-1-[29-[[2-(acetylamino)-2-deoxy-beta-D-galactopyra nosyl]oxy]-14,14-bis[[3-[[3-[[5-[[2-(acetylamino)-2-deoxy-b eta-D-galactopyranosyl]oxy]-1-oxopentyl]amino]propyl]amino] -3-oxopropoxy]methyl]-1,12,19,25-tetraoxo-16-oxa-13,20,24-t riazanonacos-1-yl]-4-hydroxy-2-pyrrolidinyl)methyl ester
ttgtgagagagatgctacaaa

SEQ ID NO: 199 - RNA, 21 nt, synthetic construct
  source 1..21: mol_type = other RNA
  modified_base 1: mod_base = OTHER; note = 2'-deoxy-2'-fluorouridine-3'-phosphorothioate
  modified_base 2: mod_base = OTHER; note = 2'-O-methylcytidine-3'-phosphorothioate
  modified_base 3: mod_base = OTHER; note = 2'-deoxy-2'-fluorocytidine-3'-phosphate
  modified_base 4: mod_base = OTHER; note = 2'-O-methyluridine-3'-phosphate
  modified_base 5: mod_base = OTHER; note = 2'-deoxy-2'-fluorouridine-3'-phosphate
  modified_base 6: mod_base = OTHER; note = 2'-O-methylcytidine-3'-phosphate
  modified_base 7: mod_base = OTHER; note = 2'-deoxy-2'-fluoroadenosine-3'-phosphate
  modified_base 8: mod_base = OTHER; note = 2'-O-methyluridine-3'-phosphate
  modified_base 9: mod_base = OTHER; note = 2'-deoxy-2'-fluoroguanosine-3'-phosphate
  modified_base 10: mod_base = OTHER; note = 2'-deoxy-2'-fluoroadenosine-3'-phosphate
  modified_base 11: mod_base = OTHER; note = 2'-deoxy-2'-fluoroadenosine-3'-phosphate
  modified_base 12: mod_base = OTHER; note = 2'-O-methyluridine-3'-phosphate
  modified_base 13: mod_base = OTHER; note = 2'-deoxy-2'-fluoroguanosine-3'-phosphate
  modified_base 14: mod_base = OTHER; note = 2'-O-methyluridine-3'-phosphate
  modified_base 15: mod_base = OTHER; note = 2'-deoxy-2'-fluorouridine-3'-phosphate
  modified_base 16: mod_base = OTHER; note = 2'-O-methylcytidine-3'-phosphate
  modified_base 17: mod_base = OTHER; note = 2'-deoxy-2'-fluorocytidine-3'-phosphate
  modified_base 18: mod_base = OTHER; note = 2'-O-methylguanosine-3'-phosphate
  modified_base 19: mod_base = OTHER; note = 2'-deoxy-2'-fluoroguanosine-3'-phosphate
  modified_base 20: mod_base = OTHER; note = 2'-O-methylguanosine-3'-phosphate
  modified_base 21: mod_base = OTHER; note = 2'-deoxy-2'-fluoroadenosine-3'-phosphate ((2S,4R)-1-[29-[[2-(acetylamino)-2-deoxy-beta-D-galactopyra nosyl]oxy]-14,14-bis[[3-[[3-[[5-[[2-(acetylamino)-2-deoxy-b eta-D-galactopyranosyl]oxy]-1-oxopentyl]amino]propyl]amino] -3-oxopropoxy]methyl]-1,12,19,25-tetraoxo-16-oxa-13,20,24-t riazanonacos-1-yl]-4-hydroxy-2-pyrrolidinyl)methyl ester
tccttcatgaatgttccggga

SEQ ID NO: 200 - RNA, 21 nt, synthetic construct
  source 1..21: mol_type = other RNA
  modified_base 1: mod_base = OTHER; note = 2'-deoxy-2'-fluorouridine-3'-phosphorothioate
  modified_base 2: mod_base = OTHER; note = 2'-O-methylcytidine-3'-phosphorothioate
  modified_base 3: mod_base = OTHER; note = 2'-deoxy-2'-fluoroadenosine-3'-phosphate
  modified_base 4: mod_base = OTHER; note = 2'-O-methylcytidine-3'-phosphate
  modified_base 5: mod_base = OTHER; note = 2'-deoxy-2'-fluoroadenosine-3'-phosphate
  modified_base 6: mod_base = OTHER; note = 2'-O-methylguanosine-3'-phosphate
  modified_base 7: mod_base = OTHER; note = 2'-deoxy-2'-fluoroadenosine-3'-phosphate
  modified_base 8: mod_base = OTHER; note = 2'-O-methylguanosine-3'-phosphate
  modified_base 9: mod_base = OTHER; note = 2'-deoxy-2'-fluoroadenosine-3'-phosphate
  modified_base 10: mod_base = OTHER; note = 2'-deoxy-2'-fluoroadenosine-3'-phosphate
  modified_base 11: mod_base = OTHER; note = 2'-deoxy-2'-fluoroguanosine-3'-phosphate
  modified_base 12: mod_base = OTHER; note = 2'-O-methylcytidine-3'-phosphate
  modified_base 13: mod_base = OTHER; note = 2'-deoxy-2'-fluorouridine-3'-phosphate
  modified_base 14: mod_base = OTHER; note = 2'-O-methylcytidine-3'-phosphate
  modified_base 15: mod_base = OTHER; note = 2'-deoxy-2'-fluoroadenosine-3'-phosphate
  modified_base 16: mod_base = OTHER; note = 2'-O-methyladenosine-3'-phosphate
  modified_base 17: mod_base = OTHER; note = 2'-deoxy-2'-fluorocytidine-3'-phosphate
  modified_base 18: mod_base = OTHER; note = 2'-O-methylcytidine-3'-phosphate
  modified_base 19: mod_base = OTHER; note = 2'-deoxy-2'-fluoroadenosine-3'-phosphate
  modified_base 20: mod_base = OTHER; note = 2'-O-methyladenosine-3'-phosphate
  modified_base 21: mod_base = OTHER; note = 2'-deoxy-2'-fluoroadenosine-3'-phosphate ((2S,4R)-1-[29-[[2-(acetylamino)-2-deoxy-beta-D-galactopyra nosyl]oxy]-14,14-bis[[3-[[3-[[5-[[2-(acetylamino)-2-deoxy-b eta-D-galactopyranosyl]oxy]-1-oxopentyl]amino]propyl]amino] -3-oxopropoxy]methyl]-1,12,19,25-tetraoxo-16-oxa-13,20,24-t riazanonacos-1-yl]-4-hydroxy-2-pyrrolidinyl)methyl ester
tcacagagaagctcaaccaaa

SEQ ID NO: 201 - RNA, 21 nt, synthetic construct
  source 1..21: mol_type = other RNA
  modified_base 1: mod_base = OTHER; note = 2'-deoxy-2'-fluorocytidine-3'-phosphorothioate
  modified_base 2: mod_base = OTHER; note = 2'-O-methyluridine-3'-phosphorothioate
  modified_base 3: mod_base = OTHER; note = 2'-deoxy-2'-fluorocytidine-3'-phosphate
  modified_base 4: mod_base = OTHER; note = 2'-O-methyladenosine-3'-phosphate
  modified_base 5: mod_base = OTHER; note = 2'-deoxy-2'-fluoroadenosine-3'-phosphate
  modified_base 6: mod_base = OTHER; note = 2'-O-methylcytidine-3'-phosphate
  modified_base 7: mod_base = OTHER; note = 2'-deoxy-2'-fluorocytidine-3'-phosphate
  modified_base 8: mod_base = OTHER; note = 2'-O-methyladenosine-3'-phosphate
  modified_base 9: mod_base = OTHER; note = 2'-deoxy-2'-fluoroadenosine-3'-phosphate
  modified_base 10: mod_base = OTHER; note = 2'-deoxy-2'-fluoroadenosine-3'-phosphate
  modified_base 11: mod_base = OTHER; note = 2'-deoxy-2'-fluorouridine-3'-phosphate
  modified_base 12: mod_base = OTHER; note = 2'-O-methylcytidine-3'-phosphate
  modified_base 13: mod_base = OTHER; note = 2'-deoxy-2'-fluoroadenosine-3'-phosphate
  modified_base 14: mod_base = OTHER; note = 2'-O-methylguanosine-3'-phosphate
  modified_base 15: mod_base = OTHER; note = 2'-deoxy-2'-fluorouridine-3'-phosphate
  modified_base 16: mod_base = OTHER; note = 2'-O-methyluridine-3'-phosphate
  modified_base 17: mod_base = OTHER; note = 2'-deoxy-2'-fluoroadenosine-3'-phosphate
  modified_base 18: mod_base = OTHER; note = 2'-O-methyluridine-3'-phosphate
  modified_base 19: mod_base = OTHER; note = 2'-deoxy-2'-fluoroguanosine-3'-phosphate
  modified_base 20: mod_base = OTHER; note = 2'-O-methyladenosine-3'-phosphate
  modified_base 21: mod_base = OTHER; note = 2'-deoxy-2'-fluoroadenosine-3'-phosphate ((2S,4R)-1-[29-[[2-(acetylamino)-2-deoxy-beta-D-galactopyra nosyl]oxy]-14,14-bis[[3-[[3-[[5-[[2-(acetylamino)-2-deoxy-b eta-D-galactopyranosyl]oxy]-1-oxopentyl]amino]propyl]amino] -3-oxopropoxy]methyl]-1,12,19,25-tetraoxo-16-oxa-13,20,24-t riazanonacos-1-yl]-4-hydroxy-2-pyrrolidinyl)methyl ester
ctcaaccaaatcagttatgaa

SEQ ID NO: 202 - RNA, 21 nt, synthetic construct
  source 1..21: mol_type = other RNA
  modified_base 1: mod_base = OTHER; note = 2'-deoxy-2'-fluorocytidine-3'-phosphorothioate
  modified_base 2: mod_base = OTHER; note = 2'-O-methylcytidine-3'-phosphorothioate
  modified_base 3: mod_base = OTHER; note = 2'-deoxy-2'-fluorocytidine-3'-phosphate
  modified_base 4: mod_base = OTHER; note = 2'-O-methyluridine-3'-phosphate
  modified_base 5: mod_base = OTHER; note = 2'-deoxy-2'-fluoroguanosine-3'-phosphate
  modified_base 6: mod_base = OTHER; note = 2'-O-methyladenosine-3'-phosphate
  modified_base 7: mod_base = OTHER; note = 2'-deoxy-2'-fluorocytidine-3'-phosphate
  modified_base 8: mod_base = OTHER; note = 2'-O-methyladenosine-3'-phosphate
  modified_base 9: mod_base = OTHER; note = 2'-deoxy-2'-fluoroguanosine-3'-phosphate
  modified_base 10: mod_base = OTHER; note = 2'-deoxy-2'-fluoroadenosine-3'-phosphate
  modified_base 11: mod_base = OTHER; note = 2'-deoxy-2'-fluoroguanosine-3'-phosphate
  modified_base 12: mod_base = OTHER; note = 2'-O-methyladenosine-3'-phosphate
  modified_base 13: mod_base = OTHER; note = 2'-deoxy-2'-fluorocytidine-3'-phosphate
  modified_base 14: mod_base = OTHER; note = 2'-O-methylcytidine-3'-phosphate
  modified_base 15: mod_base = OTHER; note = 2'-deoxy-2'-fluoroadenosine-3'-phosphate
  modified_base 16: mod_base = OTHER; note = 2'-O-methyluridine-3'-phosphate
  modified_base 17: mod_base = OTHER; note = 2'-deoxy-2'-fluorocytidine-3'-phosphate
  modified_base 18: mod_base = OTHER; note = 2'-O-methylguanosine-3'-phosphate
  modified_base 19: mod_base = OTHER; note = 2'-deoxy-2'-fluoroadenosine-3'-phosphate
  modified_base 20: mod_base = OTHER; note = 2'-O-methyladenosine-3'-phosphate
  modified_base 21: mod_base = OTHER; note = 2'-deoxy-2'-fluoroguanosine-3'-phosphate ((2S,4R)-1-[29-[[2-(acetylamino)-2-deoxy-beta-D-galactopyra nosyl]oxy]-14,14-bis[[3-[[3-[[5-[[2-(acetylamino)-2-deoxy-b eta-D-galactopyranosyl]oxy]-1-oxopentyl]amino]propyl]amino] -3-oxopropoxy]methyl]-1,12,19,25-tetraoxo-16-oxa-13,20,24-t riazanonacos-1-yl]-4-hydroxy-2-pyrrolidinyl)methyl ester
ccctgacagagaccatcgaag

SEQ ID NO: 203 - RNA, 21 nt, synthetic construct
  source 1..21: mol_type = other RNA
  modified_base 1: mod_base = OTHER; note = 2'-deoxy-2'-fluoroguanosine-3'-phosphorothioate
  modified_base 2: mod_base = OTHER; note = 2'-O-methyladenosine-3'-phosphorothioate
  modified_base 3: mod_base = OTHER; note = 2'-deoxy-2'-fluoroguanosine-3'-phosphate
  modified_base 4: mod_base = OTHER; note = 2'-O-methylcytidine-3'-phosphate
  modified_base 5: mod_base = OTHER; note = 2'-deoxy-2'-fluoroadenosine-3'-phosphate
  modified_base 6: mod_base = OTHER; note = 2'-O-methylguanosine-3'-phosphate
  modified_base 7: mod_base = OTHER; note = 2'-deoxy-2'-fluoroadenosine-3'-phosphate
  modified_base 8: mod_base = OTHER; note = 2'-O-methyluridine-3'-phosphate
  modified_base 9: mod_base = OTHER; note = 2'-deoxy-2'-fluorouridine-3'-phosphate
  modified_base 10: mod_base = OTHER; note = 2'-deoxy-2'-fluoroguanosine-3'-phosphate
  modified_base 11: mod_base = OTHER; note = 2'-deoxy-2'-fluorocytidine-3'-phosphate
  modified_base 12: mod_base = OTHER; note = 2'-O-methyladenosine-3'-phosphate
  modified_base 13: mod_base = OTHER; note = 2'-deoxy-2'-fluorouridine-3'-phosphate
  modified_base 14: mod_base = OTHER; note = 2'-O-methyladenosine-3'-phosphate
  modified_base 15: mod_base = OTHER; note = 2'-deoxy-2'-fluoroadenosine-3'-phosphate
  modified_base 16: mod_base = OTHER; note = 2'-O-methyladenosine-3'-phosphate
  modified_base 17: mod_base = OTHER; note = 2'-deoxy-2'-fluoroadenosine-3'-phosphate
  modified_base 18: mod_base = OTHER; note = 2'-O-methylguanosine-3'-phosphate
  modified_base 19: mod_base = OTHER; note = 2'-deoxy-2'-fluoroguanosine-3'-phosphate
  modified_base 20: mod_base = OTHER; note = 2'-O-methyluridine-3'-phosphate
  modified_base 21: mod_base = OTHER; note = 2'-deoxy-2'-fluorouridine-3'-phosphate ((2S,4R)-1-[29-[[2-(acetylamino)-2-deoxy-beta-D-galactopyra nosyl]oxy]-14,14-bis[[3-[[3-[[5-[[2-(acetylamino)-2-deoxy-b eta-D-galactopyranosyl]oxy]-1-oxopentyl]amino]propyl]amino] -3-oxopropoxy]methyl]-1,12,19,25-tetraoxo-16-oxa-13,20,24-t riazanonacos-1-yl]-4-hydroxy-2-pyrrolidinyl)methyl ester
gagcagattgcataaaaggtt

SEQ ID NO: 204 - RNA, 21 nt, synthetic construct
  source 1..21: mol_type = other RNA
  modified_base 1: mod_base = OTHER; note = 2'-deoxy-2'-fluorocytidine-3'-phosphorothioate
  modified_base 2: mod_base = OTHER; note = 2'-O-methyluridine-3'-phosphorothioate
  modified_base 3: mod_base = OTHER; note = 2'-deoxy-2'-fluorouridine-3'-phosphate
  modified_base 4: mod_base = OTHER; note = 2'-O-methylcytidine-3'-phosphate
  modified_base 5: mod_base = OTHER; note = 2'-deoxy-2'-fluoroadenosine-3'-phosphate
  modified_base 6: mod_base = OTHER; note = 2'-O-methyluridine-3'-phosphate
  modified_base 7: mod_base = OTHER; note = 2'-deoxy-2'-fluoroguanosine-3'-phosphate
  modified_base 8: mod_base = OTHER; note = 2'-O-methyladenosine-3'-phosphate
  modified_base 9: mod_base = OTHER; note = 2'-deoxy-2'-fluoroadenosine-3'-phosphate
  modified_base 10: mod_base = OTHER; note = 2'-deoxy-2'-fluorouridine-3'-phosphate
  modified_base 11: mod_base = OTHER; note = 2'-deoxy-2'-fluoroguanosine-3'-phosphate
  modified_base 12: mod_base = OTHER; note = 2'-O-methyluridine-3'-phosphate
  modified_base 13: mod_base = OTHER; note = 2'-deoxy-2'-fluorouridine-3'-phosphate
  modified_base 14: mod_base = OTHER; note = 2'-O-methylcytidine-3'-phosphate
  modified_base 15: mod_base = OTHER; note = 2'-deoxy-2'-fluorocytidine-3'-phosphate
  modified_base 16: mod_base = OTHER; note = 2'-O-methylguanosine-3'-phosphate
  modified_base 17: mod_base = OTHER; note = 2'-deoxy-2'-fluoroguanosine-3'-phosphate
  modified_base 18: mod_base = OTHER; note = 2'-O-methylguanosine-3'-phosphate
  modified_base 19: mod_base = OTHER; note = 2'-deoxy-2'-fluoroadenosine-3'-phosphate
  modified_base 20: mod_base = OTHER; note = 2'-O-methyladenosine-3'-phosphate
  modified_base 21: mod_base = OTHER; note = 2'-deoxy-2'-fluoroguanosine-3'-phosphate ((2S,4R)-1-[29-[[2-(acetylamino)-2-deoxy-beta-D-galactopyra nosyl]oxy]-14,14-bis[[3-[[3-[[5-[[2-(acetylamino)-2-deoxy-b eta-D-galactopyranosyl]oxy]-1-oxopentyl]amino]propyl]amino] -3-oxopropoxy]methyl]-1,12,19,25-tetraoxo-16-oxa-13,20,24-t riazanonacos-1-yl]-4-hydroxy-2-pyrrolidinyl)methyl ester
cttcatgaatgttccgggaag

SEQ ID NO: 205 - RNA, 21 nt, synthetic construct
  source 1..21: mol_type = other RNA
  modified_base 1: mod_base = OTHER; note = 2'-deoxy-2'-fluorocytidine-3'-phosphorothioate
  modified_base 2: mod_base = OTHER; note = 2'-O-methyluridine-3'-phosphorothioate
  modified_base 3: mod_base = OTHER; note = 2'-deoxy-2'-fluorouridine-3'-phosphate
  modified_base 4: mod_base = OTHER; note = 2'-O-methylcytidine-3'-phosphate
  modified_base 5: mod_base = OTHER; note = 2'-deoxy-2'-fluoroadenosine-3'-phosphate
  modified_base 6: mod_base = OTHER; note = 2'-O-methyluridine-3'-phosphate
  modified_base 7: mod_base = OTHER; note = 2'-deoxy-2'-fluorouridine-3'-phosphate
  modified_base 8: mod_base = OTHER; note = 2'-O-methylcytidine-3'-phosphate
  modified_base 9: mod_base = OTHER; note = 2'-deoxy-2'-fluoroadenosine-3'-phosphate
  modified_base 10: mod_base = OTHER; note = 2'-deoxy-2'-fluoroadenosine-3'-phosphate
  modified_base 11: mod_base = OTHER; note = 2'-deoxy-2'-fluoroguanosine-3'-phosphate
  modified_base 12: mod_base = OTHER; note = 2'-O-methyluridine-3'-phosphate
  modified_base 13: mod_base = OTHER; note = 2'-deoxy-2'-fluorouridine-3'-phosphate
  modified_base 14: mod_base = OTHER; note = 2'-O-methylguanosine-3'-phosphate
  modified_base 15: mod_base = OTHER; note = 2'-deoxy-2'-fluoroguanosine-3'-phosphate
  modified_base 16: mod_base = OTHER; note = 2'-O-methyluridine-3'-phosphate
  modified_base 17: mod_base = OTHER; note = 2'-deoxy-2'-fluoroguanosine-3'-phosphate
  modified_base 18: mod_base = OTHER; note = 2'-O-methyluridine-3'-phosphate
  modified_base 19: mod_base = OTHER; note = 2'-deoxy-2'-fluoroguanosine-3'-phosphate
  modified_base 20: mod_base = OTHER; note = 2'-O-methyladenosine-3'-phosphate
  modified_base 21: mod_base = OTHER; note = 2'-deoxy-2'-fluorouridine-3'-phosphate ((2S,4R)-1-[29-[[2-(acetylamino)-2-deoxy-beta-D-galactopyra nosyl]oxy]-14,14-bis[[3-[[3-[[5-[[2-(acetylamino)-2-deoxy-b eta-D-galactopyranosyl]oxy]-1-oxopentyl]amino]propyl]amino] -3-oxopropoxy]methyl]-1,12,19,25-tetraoxo-16-oxa-13,20,24-t riazanonacos-1-yl]-4-hydroxy-2-pyrrolidinyl)methyl ester
cttcattcaagttggtgtgat

SEQ ID NO: 206 - RNA, 21 nt, synthetic construct
  source 1..21: mol_type = other RNA
  modified_base 1: mod_base = OTHER; note = 2'-deoxy-2'-fluoroguanosine-3'-phosphorothioate
  modified_base 2: mod_base = OTHER; note = 2'-O-methyladenosine-3'-phosphorothioate
  modified_base 3: mod_base = OTHER; note = 2'-deoxy-2'-fluorouridine-3'-phosphate
  modified_base 4: mod_base = OTHER; note = 2'-O-methyluridine-3'-phosphate
  modified_base 5: mod_base = OTHER; note = 2'-deoxy-2'-fluoroguanosine-3'-phosphate
  modified_base 6: mod_base = OTHER; note = 2'-O-methyladenosine-3'-phosphate
  modified_base 7: mod_base = OTHER; note = 2'-deoxy-2'-fluoroadenosine-3'-phosphate
  modified_base 8: mod_base = OTHER; note = 2'-O-methylguanosine-3'-phosphate
  modified_base 9: mod_base = OTHER; note = 2'-deoxy-2'-fluoroadenosine-3'-phosphate
  modified_base 10: mod_base = OTHER; note = 2'-deoxy-2'-fluoroguanosine-3'-phosphate
  modified_base 11: mod_base = OTHER; note = 2'-deoxy-2'-fluoroguanosine-3'-phosphate
  modified_base 12: mod_base = OTHER; note = 2'-O-methyluridine-3'-phosphate
  modified_base 13: mod_base = OTHER; note = 2'-deoxy-2'-fluorocytidine-3'-phosphate
  modified_base 14: mod_base = OTHER; note = 2'-O-methylcytidine-3'-phosphate
  modified_base 15: mod_base = OTHER; note = 2'-deoxy-2'-fluorouridine-3'-phosphate
  modified_base 16: mod_base = OTHER; note = 2'-O-methylguanosine-3'-phosphate
  modified_base 17: mod_base = OTHER; note = 2'-deoxy-2'-fluorouridine-3'-phosphate
  modified_base 18: mod_base = OTHER; note = 2'-O-methyluridine-3'-phosphate
  modified_base 19: mod_base = OTHER; note = 2'-deoxy-2'-fluorocytidine-3'-phosphate
  modified_base 20: mod_base = OTHER; note = 2'-O-methylcytidine-3'-phosphate
  modified_base 21: mod_base = OTHER; note = 2'-deoxy-2'-fluoroadenosine-3'-phosphate ((2S,4R)-1-[29-[[2-(acetylamino)-2-deoxy-beta-D-galactopyra nosyl]oxy]-14,14-bis[[3-[[3-[[5-[[2-(acetylamino)-2-deoxy-b eta-D-galactopyranosyl]oxy]-1-oxopentyl]amino]propyl]amino] -3-oxopropoxy]methyl]-1,12,19,25-tetraoxo-16-oxa-13,20,24-t riazanonacos-1-yl]-4-hydroxy-2-pyrrolidinyl)methyl ester
gattgaagaggtcctgttcca

SEQ ID NO: 207 - RNA, 21 nt, synthetic construct
  source 1..21: mol_type = other RNA
  modified_base 1: mod_base = OTHER; note = 2'-deoxy-2'-fluoroadenosine-3'-phosphorothioate
  modified_base 2: mod_base = OTHER; note = 2'-O-methyluridine-3'-phosphorothioate
  modified_base 3: mod_base = OTHER; note = 2'-deoxy-2'-fluorouridine-3'-phosphate
  modified_base 4: mod_base = OTHER; note = 2'-O-methyluridine-3'-phosphate
  modified_base 5: mod_base = OTHER; note = 2'-deoxy-2'-fluorocytidine-3'-phosphate
  modified_base 6: mod_base = OTHER; note = 2'-O-methyluridine-3'-phosphate
  modified_base 7: mod_base = OTHER; note = 2'-deoxy-2'-fluorouridine-3'-phosphate
  modified_base 8: mod_base = OTHER; note = 2'-O-methyluridine-3'-phosphate
  modified_base 9: mod_base = OTHER; note = 2'-deoxy-2'-fluorouridine-3'-phosphate
  modified_base 10: mod_base = OTHER; note = 2'-deoxy-2'-fluorocytidine-3'-phosphate
  modified_base 11: mod_base = OTHER; note = 2'-deoxy-2'-fluoroadenosine-3'-phosphate
  modified_base 12: mod_base = OTHER; note = 2'-O-methyladenosine-3'-phosphate
  modified_base 13: mod_base = OTHER; note = 2'-deoxy-2'-fluorouridine-3'-phosphate
  modified_base 14: mod_base = OTHER; note = 2'-O-methylguanosine-3'-phosphate
  modified_base 15: mod_base = OTHER; note = 2'-deoxy-2'-fluorocytidine-3'-phosphate
  modified_base 16: mod_base = OTHER; note = 2'-O-methyluridine-3'-phosphate
  modified_base 17: mod_base = OTHER; note = 2'-deoxy-2'-fluoroadenosine-3'-phosphate
  modified_base 18: mod_base = OTHER; note = 2'-O-methyluridine-3'-phosphate
  modified_base 19: mod_base = OTHER; note = 2'-deoxy-2'-fluoroguanosine-3'-phosphate
  modified_base 20: mod_base = OTHER; note = 2'-O-methyladenosine-3'-phosphate
  modified_base 21: mod_base = OTHER; note = 2'-deoxy-2'-fluorouridine-3'-phosphate ((2S,4R)-1-[29-[[2-(acetylamino)-2-deoxy-beta-D-galactopyra nosyl]oxy]-14,14-bis[[3-[[3-[[5-[[2-(acetylamino)-2-deoxy-b eta-D-galactopyranosyl]oxy]-1-oxopentyl]amino]propyl]amino] -3-oxopropoxy]methyl]-1,12,19,25-tetraoxo-16-oxa-13,20,24-t riazanonacos-1-yl]-4-hydroxy-2-pyrrolidinyl)methyl ester
atttcttttcaatgctatgat

SEQ ID NO: 208 - RNA, 21 nt, synthetic construct
  source 1..21: mol_type = other RNA
  modified_base 1: mod_base = OTHER; note = 2'-deoxy-2'-fluorocytidine-3'-phosphorothioate
  modified_base 2: mod_base = OTHER; note = 2'-O-methylcytidine-3'-phosphorothioate
  modified_base 3: mod_base = OTHER; note = 2'-deoxy-2'-fluoroadenosine-3'-phosphate
  modified_base 4: mod_base = OTHER; note = 2'-O-methylguanosine-3'-phosphate
  modified_base 5: mod_base = OTHER; note = 2'-deoxy-2'-fluoroadenosine-3'-phosphate
  modified_base 6: mod_base = OTHER; note = 2'-O-methylguanosine-3'-phosphate
  modified_base 7: mod_base = OTHER; note = 2'-deoxy-2'-fluorocytidine-3'-phosphate
  modified_base 8: mod_base = OTHER; note = 2'-O-methyladenosine-3'-phosphate
  modified_base 9: mod_base = OTHER; note = 2'-deoxy-2'-fluoroguanosine-3'-phosphate
  modified_base 10: mod_base = OTHER; note = 2'-deoxy-2'-fluoroadenosine-3'-phosphate
  modified_base 11: mod_base = OTHER; note = 2'-deoxy-2'-fluorouridine-3'-phosphate
  modified_base 12: mod_base = OTHER; note = 2'-O-methyluridine-3'-phosphate
  modified_base 13: mod_base = OTHER; note = 2'-deoxy-2'-fluoroguanosine-3'-phosphate
  modified_base 14: mod_base = OTHER; note = 2'-O-methylcytidine-3'-phosphate
  modified_base 15: mod_base = OTHER; note = 2'-deoxy-2'-fluoroadenosine-3'-phosphate
  modified_base 16: mod_base = OTHER; note = 2'-O-methyluridine-3'-phosphate
  modified_base 17: mod_base = OTHER; note = 2'-deoxy-2'-fluoroadenosine-3'-phosphate
  modified_base 18: mod_base = OTHER; note = 2'-O-methyladenosine-3'-phosphate
  modified_base 19: mod_base = OTHER; note = 2'-deoxy-2'-fluoroadenosine-3'-phosphate
  modified_base 20: mod_base = OTHER; note = 2'-O-methyladenosine-3'-phosphate
  modified_base 21: mod_base = OTHER; note = 2'-deoxy-2'-fluoroguanosine-3'-phosphate ((2S,4R)-1-[29-[[2-(acetylamino)-2-deoxy-beta-D-galactopyra nosyl]oxy]-14,14-bis[[3-[[3-[[5-[[2-(acetylamino)-2-deoxy-b eta-D-galactopyranosyl]oxy]-1-oxopentyl]amino]propyl]amino] -3-oxopropoxy]methyl]-1,12,19,25-tetraoxo-16-oxa-13,20,24-t riazanonacos-1-yl]-4-hydroxy-2-pyrrolidinyl)methyl ester
ccagagcagattgcataaaag

SEQ ID NO: 209 - RNA, 21 nt, synthetic construct
  source 1..21: mol_type = other RNA
  modified_base 1: mod_base = OTHER; note = 2'-deoxy-2'-fluorocytidine-3'-phosphorothioate
  modified_base 2: mod_base = OTHER; note = 2'-O-methyladenosine-3'-phosphorothioate
  modified_base 3: mod_base = OTHER; note = 2'-deoxy-2'-fluorocytidine-3'-phosphate
  modified_base 4: mod_base = OTHER; note = 2'-O-methyladenosine-3'-phosphate
  modified_base 5: mod_base = OTHER; note = 2'-deoxy-2'-fluoroguanosine-3'-phosphate
  modified_base 6: mod_base = OTHER; note = 2'-O-methyladenosine-3'-phosphate
  modified_base 7: mod_base = OTHER; note = 2'-deoxy-2'-fluoroguanosine-3'-phosphate
  modified_base 8: mod_base = OTHER; note = 2'-O-methyladenosine-3'-phosphate
  modified_base 9: mod_base = OTHER; note = 2'-deoxy-2'-fluoroadenosine-3'-phosphate
  modified_base 10: mod_base = OTHER; note = 2'-deoxy-2'-fluoroguanosine-3'-phosphate
  modified_base 11: mod_base = OTHER; note = 2'-deoxy-2'-fluorocytidine-3'-phosphate
  modified_base 12: mod_base = OTHER; note = 2'-O-methyluridine-3'-phosphate
  modified_base 13: mod_base = OTHER; note = 2'-deoxy-2'-fluorocytidine-3'-phosphate
  modified_base 14: mod_base = OTHER; note = 2'-O-methyladenosine-3'-phosphate
  modified_base 15: mod_base = OTHER; note = 2'-deoxy-2'-fluoroadenosine-3'-phosphate
  modified_base 16: mod_base = OTHER; note = 2'-O-methylcytidine-3'-phosphate
  modified_base 17: mod_base = OTHER; note = 2'-deoxy-2'-fluorocytidine-3'-phosphate
  modified_base 18: mod_base = OTHER; note = 2'-O-methyladenosine-3'-phosphate
  modified_base 19: mod_base = OTHER; note = 2'-deoxy-2'-fluoroadenosine-3'-phosphate
  modified_base 20: mod_base = OTHER; note = 2'-O-methyladenosine-3'-phosphate
  modified_base 21: mod_base = OTHER; note = 2'-deoxy-2'-fluorouridine-3'-phosphate ((2S,4R)-1-[29-[[2-(acetylamino)-2-deoxy-beta-D-galactopyra nosyl]oxy]-14,14-bis[[3-[[3-[[5-[[2-(acetylamino)-2-deoxy-b eta-D-galactopyranosyl]oxy]-1-oxopentyl]amino]propyl]amino] -3-oxopropoxy]methyl]-1,12,19,25-tetraoxo-16-oxa-13,20,24-t riazanonacos-1-yl]-4-hydroxy-2-pyrrolidinyl)methyl ester
cacagagaagctcaaccaaat

SEQ ID NO: 210 - RNA, 23 nt, synthetic construct
  source 1..23: mol_type = other RNA
  modified_base 1: mod_base = OTHER; note = 2'-O-methylguanosine-3'-phosphorothioate
  modified_base 2: mod_base = OTHER; note = 2'-deoxy-2'-fluorouridine-3'-phosphorothioate
  modified_base 3: mod_base = OTHER; note = 2'-O-methylguanosine-3'-phosphate
  modified_base 4: mod_base = OTHER; note = 2'-deoxy-2'-fluoroadenosine-3'-phosphate
  modified_base 5: mod_base = OTHER; note = 2'-O-methylcytidine-3'-phosphate
  modified_base 6: mod_base = OTHER; note = 2'-deoxy-2'-fluorouridine-3'-phosphate
  modified_base 7: mod_base = OTHER; note = 2'-O-methylguanosine-3'-phosphate
  modified_base 8: mod_base = OTHER; note = 2'-deoxy-2'-fluoroadenosine-3'-phosphate
  modified_base 9: mod_base = OTHER; note = 2'-O-methylguanosine-3'-phosphate
  modified_base 10: mod_base = OTHER; note = 2'-deoxy-2'-fluoroadenosine-3'-phosphate
  modified_base 11: mod_base = OTHER; note = 2'-O-methyluridine-3'-phosphate
  modified_base 12: mod_base = OTHER; note = 2'-O-methylcytidine-3'-phosphate
  modified_base 13: mod_base = OTHER; note = 2'-O-methyluridine-3'-phosphate
  modified_base 14: mod_base = OTHER; note = 2'-deoxy-2'-fluorouridine-3'-phosphate
  modified_base 15: mod_base = OTHER; note = 2'-O-methylguanosine-3'-phosphate
  modified_base 16: mod_base = OTHER; note = 2'-deoxy-2'-fluoroguanosine-3'-phosphate
  modified_base 17: mod_base = OTHER; note = 2'-O-methylcytidine-3'-phosphate
  modified_base 18: mod_base = OTHER; note = 2'-deoxy-2'-fluorouridine-3'-phosphate
  modified_base 19: mod_base = OTHER; note = 2'-O-methyluridine-3'-phosphate
  modified_base 20: mod_base = OTHER; note = 2'-deoxy-2'-fluoroguanosine-3'-phosphate
  modified_base 21: mod_base = OTHER; note = 2'-O-methylcytidine-3'-phosphorothioate
  modified_base 22: mod_base = OTHER; note = 2'-O-methylcytidine-3'-phosphorothioate
  modified_base 23: mod_base = OTHER; note = 2'-O-methyladenosine
gtgactgagatcttggcttgcca

SEQ ID NO: 211 - RNA, 23 nt, synthetic construct
  source 1..23: mol_type = other RNA
  modified_base 1: mod_base = OTHER; note = 2'-O-methyluridine-3'-phosphorothioate
  modified_base 2: mod_base = OTHER; note = 2'-deoxy-2'-fluoroadenosine-3'-phosphorothioate
  modified_base 3: mod_base = OTHER; note = 2'-O-methyladenosine-3'-phosphate
  modified_base 4: mod_base = OTHER; note = 2'-deoxy-2'-fluorocytidine-3'-phosphate
  modified_base 5: mod_base = OTHER; note = 2'-O-methyluridine-3'-phosphate
  modified_base 6: mod_base = OTHER; note = 2'-deoxy-2'-fluorocytidine-3'-phosphate
  modified_base 7: mod_base = OTHER; note = 2'-O-methylguanosine-3'-phosphate
  modified_base 8: mod_base = OTHER; note = 2'-deoxy-2'-fluorocytidine-3'-phosphate
  modified_base 9: mod_base = OTHER; note = 2'-O-methylcytidine-3'-phosphate
  modified_base 10: mod_base = OTHER; note = 2'-deoxy-2'-fluoroadenosine-3'-phosphate
  modified_base 11: mod_base = OTHER; note = 2'-O-methylcytidine-3'-phosphate
  modified_base 12: mod_base = OTHER; note = 2'-O-methylcytidine-3'-phosphate
  modified_base 13: mod_base = OTHER; note = 2'-O-methyluridine-3'-phosphate
  modified_base 14: mod_base = OTHER; note = 2'-deoxy-2'-fluorouridine-3'-phosphate
  modified_base 15: mod_base = OTHER; note = 2'-O-methylcytidine-3'-phosphate
  modified_base 16: mod_base = OTHER; note = 2'-deoxy-2'-fluorouridine-3'-phosphate
  modified_base 17: mod_base = OTHER; note = 2'-O-methylcytidine-3'-phosphate
  modified_base 18: mod_base = OTHER; note = 2'-deoxy-2'-fluoroadenosine-3'-phosphate
  modified_base 19: mod_base = OTHER; note = 2'-O-methyladenosine-3'-phosphate
  modified_base 20: mod_base = OTHER; note = 2'-deoxy-2'-fluorouridine-3'-phosphate
  modified_base 21: mod_base = OTHER; note = 2'-O-methylcytidine-3'-phosphorothioate
  modified_base 22: mod_base = OTHER; note = 2'-O-methyladenosine-3'-phosphorothioate
  modified_base 23: mod_base = OTHER; note = 2'-O-methyladenosine
taactcgccaccttctcaatcaa

SEQ ID NO: 212 - RNA, 23 nt, synthetic construct
  source 1..23: mol_type = other RNA
  modified_base 1: mod_base = OTHER; note = 2'-O-methyladenosine-3'-phosphorothioate
  modified_base 2: mod_base = OTHER; note = 2'-deoxy-2'-fluoroadenosine-3'-phosphorothioate
  modified_base 3: mod_base = OTHER; note = 2'-O-methyluridine-3'-phosphate
  modified_base 4: mod_base = OTHER; note = 2'-deoxy-2'-fluoroguanosine-3'-phosphate
  modified_base 5: mod_base = OTHER; note = 2'-O-methyladenosine-3'-phosphate
  modified_base 6: mod_base = OTHER; note = 2'-deoxy-2'-fluoroadenosine-3'-phosphate
  modified_base 7: mod_base = OTHER; note = 2'-O-methylguanosine-3'-phosphate
  modified_base 8: mod_base = OTHER; note = 2'-deoxy-2'-fluorocytidine-3'-phosphate
  modified_base 9: mod_base = OTHER; note = 2'-O-methylguanosine-3'-phosphate
  modified_base 10: mod_base = OTHER; note = 2'-deoxy-2'-fluoroguanosine-3'-phosphate
  modified_base 11: mod_base = OTHER; note = 2'-O-methylcytidine-3'-phosphate
  modified_base 12: mod_base = OTHER; note = 2'-O-methyluridine-3'-phosphate
  modified_base 13: mod_base = OTHER; note = 2'-O-methyluridine-3'-phosphate
  modified_base 14: mod_base = OTHER; note = 2'-deoxy-2'-fluorocytidine-3'-phosphate
  modified_base 15: mod_base = OTHER; note = 2'-O-methyluridine-3'-phosphate
  modified_base 16: mod_base = OTHER; note = 2'-deoxy-2'-fluorocytidine-3'-phosphate
  modified_base 17: mod_base = OTHER; note = 2'-O-methyluridine-3'-phosphate
  modified_base 18: mod_base = OTHER; note = 2'-deoxy-2'-fluorouridine-3'-phosphate
  modified_base 19: mod_base = OTHER; note = 2'-O-methylguanosine-3'-phosphate
  modified_base 20: mod_base = OTHER; note = 2'-deoxy-2'-fluorouridine-3'-phosphate
  modified_base 21: mod_base = OTHER; note = 2'-O-methylguanosine-3'-phosphorothioate
  modified_base 22: mod_base = OTHER; note = 2'-O-methyladenosine-3'-phosphorothioate
  modified_base 23: mod_base = OTHER; note = 2'-O-methyladenosine
aatgaagcggcttctcttgtgaa

SEQ ID NO: 213 - RNA, 23 nt, synthetic construct
  source 1..23: mol_type = other RNA
  modified_base 1: mod_base = OTHER; note = 2'-O-methyluridine-3'-phosphorothioate
  modified_base 2: mod_base = OTHER; note = 2'-deoxy-2'-fluorouridine-3'-phosphorothioate
  modified_base 3: mod_base = OTHER; note = 2'-O-methyluridine-3'-phosphate
  modified_base 4: mod_base = OTHER; note = 2'-deoxy-2'-fluoroguanosine-3'-phosphate
  modified_base 5: mod_base = OTHER; note = 2'-O-methyluridine-3'-phosphate
  modified_base 6: mod_base = OTHER; note = 2'-deoxy-2'-fluoroadenosine-3'-phosphate
  modified_base 7: mod_base = OTHER; note = 2'-O-methylguanosine-3'-phosphate
  modified_base 8: mod_base = OTHER; note = 2'-deoxy-2'-fluorocytidine-3'-phosphate
  modified_base 9: mod_base = OTHER; note = 2'-O-methyladenosine-3'-phosphate
  modified_base 10: mod_base = OTHER; note = 2'-deoxy-2'-fluorouridine-3'-phosphate
  modified_base 11: mod_base = OTHER; note = 2'-O-methylcytidine-3'-phosphate
  modified_base 12: mod_base = OTHER; note = 2'-O-methyluridine-3'-phosphate
  modified_base 13: mod_base = OTHER; note = 2'-O-methylcytidine-3'-phosphate
  modified_base 14: mod_base = OTHER; note = 2'-deoxy-2'-fluorouridine-3'-phosphate
  modified_base 15: mod_base = OTHER; note = 2'-O-methylcytidine-3'-phosphate
  modified_base 16: mod_base = OTHER; note = 2'-deoxy-2'-fluorouridine-3'-phosphate
  modified_base 17: mod_base = OTHER; note = 2'-O-methylcytidine-3'-phosphate
  modified_base 18: mod_base = OTHER; note = 2'-deoxy-2'-fluoroadenosine-3'-phosphate
  modified_base 19: mod_base = OTHER; note = 2'-O-methylcytidine-3'-phosphate
  modified_base 20: mod_base = OTHER; note = 2'-deoxy-2'-fluoroadenosine-3'-phosphate
  modified_base 21: mod_base = OTHER; note = 2'-O-methyladenosine-3'-phosphorothioate
  modified_base 22: mod_base = OTHER; note = 2'-O-methylcytidine-3'-phosphorothioate
  modified_base 23: mod_base = OTHER; note = 2'-O-methyluridine
tttgtagcatctctctcacaact

SEQ ID NO: 214 - RNA, 23 nt, synthetic construct
  source 1..23: mol_type = other RNA
  modified_base 1: mod_base = OTHER; note = 2'-O-methyluridine-3'-phosphorothioate
  modified_base 2: mod_base = OTHER; note = 2'-deoxy-2'-fluorocytidine-3'-phosphorothioate
  modified_base 3: mod_base = OTHER; note = 2'-O-methylcytidine-3'-phosphate
  modified_base 4: mod_base = OTHER; note = 2'-deoxy-2'-fluorocytidine-3'-phosphate
  modified_base 5: mod_base = OTHER; note = 2'-O-methylguanosine-3'-phosphate
  modified_base 6: mod_base = OTHER; note = 2'-deoxy-2'-fluoroguanosine-3'-phosphate
  modified_base 7: mod_base = OTHER; note = 2'-O-methyladenosine-3'-phosphate
  modified_base 8: mod_base = OTHER; note = 2'-deoxy-2'-fluoroadenosine-3'-phosphate
  modified_base 9: mod_base = OTHER; note = 2'-O-methylcytidine-3'-phosphate
  modified_base 10: mod_base = OTHER; note = 2'-deoxy-2'-fluoroadenosine-3'-phosphate
  modified_base 11: mod_base = OTHER; note = 2'-O-methyluridine-3'-phosphate
  modified_base 12: mod_base = OTHER; note = 2'-O-methyluridine-3'-phosphate
  modified_base 13: mod_base = OTHER; note = 2'-O-methylcytidine-3'-phosphate
  modified_base 14: mod_base = OTHER; note = 2'-deoxy-2'-fluoroadenosine-3'-phosphate
  modified_base 15: mod_base = OTHER; note = 2'-O-methyluridine-3'-phosphate
  modified_base 16: mod_base = OTHER; note = 2'-deoxy-2'-fluoroguanosine-3'-phosphate
  modified_base 17: mod_base = OTHER; note = 2'-O-methyladenosine-3'-phosphate
  modified_base 18: mod_base = OTHER; note = 2'-deoxy-2'-fluoroadenosine-3'-phosphate
  modified_base 19: mod_base = OTHER; note = 2'-O-methylguanosine-3'-phosphate
  modified_base 20: mod_base = OTHER; note = 2'-deoxy-2'-fluoroguanosine-3'-phosphate
  modified_base 21: mod_base = OTHER; note = 2'-O-methyladenosine-3'-phosphorothioate
  modified_base 22: mod_base = OTHER; note = 2'-O-methylguanosine-3'-phosphorothioate
  modified_base 23: mod_base = OTHER; note = 2'-O-methylguanosine
tcccggaacattcatgaaggagg

SEQ ID NO: 215 - RNA, 23 nt, synthetic construct
  source 1..23: mol_type = other RNA
  modified_base 1: mod_base = OTHER; note = 2'-O-methyluridine-3'-phosphorothioate
  modified_base 2: mod_base = OTHER; note = 2'-deoxy-2'-fluorouridine-3'-phosphorothioate
  modified_base 3: mod_base = OTHER; note = 2'-O-methyluridine-3'-phosphate
  modified_base 4: mod_base = OTHER; note = 2'-deoxy-2'-fluoroguanosine-3'-phosphate
  modified_base 5: mod_base = OTHER; note = 2'-O-methylguanosine-3'-phosphate
  modified_base 6: mod_base = OTHER; note = 2'-deoxy-2'-fluorouridine-3'-phosphate
  modified_base 7: mod_base = OTHER; note = 2'-O-methyluridine-3'-phosphate
  modified_base 8: mod_base = OTHER; note = 2'-deoxy-2'-fluoroguanosine-3'-phosphate
  modified_base 9: mod_base = OTHER; note = 2'-O-methyladenosine-3'-phosphate
  modified_base 10: mod_base = OTHER; note = 2'-deoxy-2'-fluoroguanosine-3'-phosphate
  modified_base 11: mod_base = OTHER; note = 2'-O-methylcytidine-3'-phosphate
  modified_base 12: mod_base = OTHER; note = 2'-O-methyluridine-3'-phosphate
  modified_base 13: mod_base = OTHER; note = 2'-O-methyluridine-3'-phosphate
  modified_base 14: mod_base = OTHER; note = 2'-deoxy-2'-fluorocytidine-3'-phosphate
  modified_base 15: mod_base = OTHER; note = 2'-O-methyluridine-3'-phosphate
  modified_base 16: mod_base = OTHER; note = 2'-deoxy-2'-fluorocytidine-3'-phosphate
  modified_base 17: mod_base = OTHER; note = 2'-O-methyluridine-3'-phosphate
  modified_base 18: mod_base = OTHER; note = 2'-deoxy-2'-fluoroguanosine-3'-phosphate
  modified_base 19: mod_base = OTHER; note = 2'-O-methyluridine-3'-phosphate
  modified_base 20: mod_base = OTHER; note = 2'-deoxy-2'-fluoroguanosine-3'-phosphate
  modified_base 21: mod_base = OTHER; note = 2'-O-methyladenosine-3'-phosphorothioate
  modified_base 22: mod_base = OTHER; note = 2'-O-methylcytidine-3'-phosphorothioate
  modified_base 23: mod_base = OTHER; note = 2'-O-methylcytidine
tttggttgagcttctctgtgacc

SEQ ID NO: 216 - RNA, 23 nt, synthetic construct
  source 1..23: mol_type = other RNA
  modified_base 1: mod_base = OTHER; note = 2'-O-methyluridine-3'-phosphorothioate
  modified_base 2: mod_base = OTHER; note = 2'-deoxy-2'-fluorouridine-3'-phosphorothioate
  modified_base 3: mod_base = OTHER; note = 2'-O-methylcytidine-3'-phosphate
  modified_base 4: mod_base = OTHER; note = 2'-deoxy-2'-fluoroadenosine-3'-phosphate
  modified_base 5: mod_base = OTHER; note = 2'-O-methyluridine-3'-phosphate
  modified_base 6: mod_base = OTHER; note = 2'-deoxy-2'-fluoroadenosine-3'-phosphate
  modified_base 7: mod_base = OTHER; note = 2'-O-methyladenosine-3'-phosphate
  modified_base 8: mod_base = OTHER; note = 2'-deoxy-2'-fluorocytidine-3'-phosphate
  modified_base 9: mod_base = OTHER; note = 2'-O-methyluridine-3'-phosphate
  modified_base 10: mod_base = OTHER; note = 2'-deoxy-2'-fluoroguanosine-3'-phosphate
  modified_base 11: mod_base = OTHER; note = 2'-O-methyladenosine-3'-phosphate
  modified_base 12: mod_base = OTHER; note = 2'-O-methyluridine-3'-phosphate
  modified_base 13: mod_base = OTHER; note = 2'-O-methyluridine-3'-phosphate
  modified_base 14: mod_base = OTHER; note = 2'-deoxy-2'-fluorouridine-3'-phosphate
  modified_base 15: mod_base = OTHER; note = 2'-O-methylguanosine-3'-phosphate
  modified_base 16: mod_base = OTHER; note = 2'-deoxy-2'-fluoroguanosine-3'-phosphate
  modified_base 17: mod_base = OTHER; note = 2'-O-methyluridine-3'-phosphate
  modified_base 18: mod_base = OTHER; note = 2'-deoxy-2'-fluorouridine-3'-phosphate
  modified_base 19: mod_base = OTHER; note = 2'-O-methylguanosine-3'-phosphate
  modified_base 20: mod_base = OTHER; note = 2'-deoxy-2'-fluoroadenosine-3'-phosphate
  modified_base 21: mod_base = OTHER; note = 2'-O-methylguanosine-3'-phosphorothioate
  modified_base 22: mod_base = OTHER; note = 2'-O-methylcytidine-3'-phosphorothioate
  modified_base 23: mod_base = OTHER; note = 2'-O-methyluridine
ttcataactgatttggttgagct

SEQ ID NO: 217 - RNA, 23 nt, synthetic construct
  source 1..23: mol_type = other RNA
  modified_base 1: mod_base = OTHER; note = 2'-O-methylcytidine-3'-phosphorothioate
  modified_base 2: mod_base = OTHER; note = 2'-deoxy-2'-fluorouridine-3'-phosphorothioate
  modified_base 3: mod_base = OTHER; note = 2'-O-methyluridine-3'-phosphate
  modified_base 4: mod_base = OTHER; note = 2'-deoxy-2'-fluorocytidine-3'-phosphate
  modified_base 5: mod_base = OTHER; note = 2'-O-methylguanosine-3'-phosphate
  modified_base 6: mod_base = OTHER; note = 2'-deoxy-2'-fluoroadenosine-3'-phosphate
  modified_base 7: mod_base = OTHER; note = 2'-O-methyluridine-3'-phosphate
  modified_base 8: mod_base = OTHER; note = 2'-deoxy-2'-fluoroguanosine-3'-phosphate
  modified_base 9: mod_base = OTHER; note = 2'-O-methylguanosine-3'-phosphate
  modified_base 10: mod_base = OTHER; note = 2'-deoxy-2'-fluorouridine-3'-phosphate
  modified_base 11: mod_base = OTHER; note = 2'-O-methylcytidine-3'-phosphate
  modified_base 12: mod_base = OTHER; note = 2'-O-methyluridine-3'-phosphate
  modified_base 13: mod_base = OTHER; note = 2'-O-methylcytidine-3'-phosphate
  modified_base 14: mod_base = OTHER; note = 2'-deoxy-2'-fluorouridine-3'-phosphate
  modified_base 15: mod_base = OTHER; note = 2'-O-methylguanosine-3'-phosphate
  modified_base 16: mod_base = OTHER; note = 2'-deoxy-2'-fluorouridine-3'-phosphate
  modified_base 17: mod_base = OTHER; note = 2'-O-methylcytidine-3'-phosphate
  modified_base 18: mod_base = OTHER; note = 2'-deoxy-2'-fluoroadenosine-3'-phosphate
  modified_base 19: mod_base = OTHER; note = 2'-O-methylguanosine-3'-phosphate
  modified_base 20: mod_base = OTHER; note = 2'-deoxy-2'-fluoroguanosine-3'-phosphate
  modified_base 21: mod_base = OTHER; note = 2'-O-methylguanosine-3'-phosphorothioate
  modified_base 22: mod_base = OTHER; note = 2'-O-methyladenosine-3'-phosphorothioate
  modified_base 23: mod_base = OTHER; note = 2'-O-methylguanosine
cttcgatggtctctgtcagggag

SEQ ID NO: 218 - RNA, 23 nt, synthetic construct
  source 1..23: mol_type = other RNA
  modified_base 1: mod_base = OTHER; note = 2'-O-methyladenosine-3'-phosphorothioate
  modified_base 2: mod_base = OTHER; note = 2'-deoxy-2'-fluoroadenosine-3'-phosphorothioate
  modified_base 3: mod_base = OTHER; note = 2'-O-methylcytidine-3'-phosphate
  modified_base 4: mod_base = OTHER; note = 2'-deoxy-2'-fluorocytidine-3'-phosphate
  modified_base 5: mod_base = OTHER; note = 2'-O-methyluridine-3'-phosphate
  modified_base 6: mod_base = OTHER; note = 2'-deoxy-2'-fluorouridine-3'-phosphate
  modified_base 7: mod_base = OTHER; note = 2'-O-methyluridine-3'-phosphate
  modified_base 8: mod_base = OTHER; note = 2'-deoxy-2'-fluorouridine-3'-phosphate
  modified_base 9: mod_base = OTHER; note = 2'-O-methyladenosine-3'-phosphate
  modified_base 10: mod_base = OTHER; note = 2'-deoxy-2'-fluorouridine-3'-phosphate
  modified_base 11: mod_base = OTHER; note = 2'-O-methylguanosine-3'-phosphate
  modified_base 12: mod_base = OTHER; note = 2'-O-methylcytidine-3'-phosphate
  modified_base 13: mod_base = OTHER; note = 2'-O-methyladenosine-3'-phosphate
  modified_base 14: mod_base = OTHER; note = 2'-deoxy-2'-fluoroadenosine-3'-phosphate
  modified_base 15: mod_base = OTHER; note = 2'-O-methyluridine-3'-phosphate
  modified_base 16: mod_base = OTHER; note = 2'-deoxy-2'-fluorocytidine-3'-phosphate
  modified_base 17: mod_base = OTHER; note = 2'-O-methyluridine-3'-phosphate
  modified_base 18: mod_base = OTHER; note = 2'-deoxy-2'-fluoroguanosine-3'-phosphate
  modified_base 19: mod_base = OTHER; note = 2'-O-methylcytidine-3'-phosphate
  modified_base 20: mod_base = OTHER; note = 2'-deoxy-2'-fluorouridine-3'-phosphate
  modified_base 21: mod_base = OTHER; note = 2'-O-methylcytidine-3'-phosphorothioate
  modified_base 22: mod_base = OTHER; note = 2'-O-methyluridine-3'-phosphorothioate
  modified_base 23: mod_base = OTHER; note = 2'-O-methylguanosine
aaccttttatgcaatctgctctg

SEQ ID NO: 219 - RNA, 23 nt, synthetic construct
  source 1..23: mol_type = other RNA
  modified_base 1: mod_base = OTHER; note = 2'-O-methylcytidine-3'-phosphorothioate
  modified_base 2: mod_base = OTHER; note = 2'-deoxy-2'-fluorouridine-3'-phosphorothioate
  modified_base 3: mod_base = OTHER; note = 2'-O-methyluridine-3'-phosphate
  modified_base 4: mod_base = OTHER; note = 2'-deoxy-2'-fluorocytidine-3'-phosphate
  modified_base 5: mod_base = OTHER; note = 2'-O-methylcytidine-3'-phosphate
  modified_base 6: mod_base = OTHER; note = 2'-deoxy-2'-fluorocytidine-3'-phosphate
  modified_base 7: mod_base = OTHER; note = 2'-O-methylguanosine-3'-phosphate
  modified_base 8: mod_base = OTHER; note = 2'-deoxy-2'-fluoroguanosine-3'-phosphate
  modified_base 9: mod_base = OTHER; note = 2'-O-methyladenosine-3'-phosphate
  modified_base 10: mod_base = OTHER; note = 2'-deoxy-2'-fluoroadenosine-3'-phosphate
  modified_base 11: mod_base = OTHER; note = 2'-O-methylcytidine-3'-phosphate
  modified_base 12: mod_base = OTHER; note = 2'-O-methyladenosine-3'-phosphate
  modified_base 13: mod_base = OTHER; note = 2'-O-methyluridine-3'-phosphate
  modified_base 14: mod_base = OTHER; note = 2'-deoxy-2'-fluorouridine-3'-phosphate
  modified_base 15: mod_base = OTHER; note = 2'-O-methylcytidine-3'-phosphate
  modified_base 16: mod_base = OTHER; note = 2'-deoxy-2'-fluoroadenosine-3'-phosphate
  modified_base 17: mod_base = OTHER; note = 2'-O-methyluridine-3'-phosphate
  modified_base 18: mod_base = OTHER; note = 2'-deoxy-2'-fluoroguanosine-3'-phosphate
  modified_base 19: mod_base = OTHER; note = 2'-O-methyladenosine-3'-phosphate
  modified_base 20: mod_base = OTHER; note = 2'-deoxy-2'-fluoroadenosine-3'-phosphate
  modified_base 21: mod_base = OTHER; note = 2'-O-methylguanosine-3'-phosphorothioate
  modified_base 22: mod_base = OTHER; note = 2'-O-methylguanosine-3'-phosphorothioate
  modified_base 23: mod_base = OTHER; note = 2'-O-methyladenosine
cttcccggaacattcatgaagga

SEQ ID NO: 220 - RNA, 23 nt, synthetic construct
  source 1..23: mol_type = other RNA
  modified_base 1: mod_base = OTHER; note = 2'-O-methyladenosine-3'-phosphorothioate
  modified_base 2: mod_base = OTHER; note = 2'-deoxy-2'-fluorouridine-3'-phosphorothioate
  modified_base 3: mod_base = OTHER; note = 2'-O-methylcytidine-3'-phosphate
  modified_base 4: mod_base = OTHER; note = 2'-deoxy-2'-fluoroadenosine-3'-phosphate
  modified_base 5: mod_base = OTHER; note = 2'-O-methylcytidine-3'-phosphate
  modified_base 6: mod_base = OTHER; note = 2'-deoxy-2'-fluoroadenosine-3'-phosphate
  modified_base 7: mod_base = OTHER; note = 2'-O-methylcytidine-3'-phosphate
  modified_base 8: mod_base = OTHER; note = 2'-deoxy-2'-fluorocytidine-3'-phosphate
  modified_base 9: mod_base = OTHER; note = 2'-O-methyladenosine-3'-phosphate
  modified_base 10: mod_base = OTHER; note = 2'-deoxy-2'-fluoroadenosine-3'-phosphate
  modified_base 11: mod_base = OTHER; note = 2'-O-methylcytidine-3'-phosphate
  modified_base 12: mod_base = OTHER; note = 2'-O-methyluridine-3'-phosphate
  modified_base 13: mod_base = OTHER; note = 2'-O-methyluridine-3'-phosphate
  modified_base 14: mod_base = OTHER; note = 2'-deoxy-2'-fluoroguanosine-3'-phosphate
  modified_base 15: mod_base = OTHER; note = 2'-O-methyladenosine-3'-phosphate
  modified_base 16: mod_base = OTHER; note = 2'-deoxy-2'-fluoroadenosine-3'-phosphate
  modified_base 17: mod_base = OTHER; note = 2'-O-methyluridine-3'-phosphate
  modified_base 18: mod_base = OTHER; note = 2'-deoxy-2'-fluoroguanosine-3'-phosphate
  modified_base 19: mod_base = OTHER; note = 2'-O-methyladenosine-3'-phosphate
  modified_base 20: mod_base = OTHER; note = 2'-deoxy-2'-fluoroadenosine-3'-phosphate
  modified_base 21: mod_base = OTHER; note = 2'-O-methylguanosine-3'-phosphorothioate
  modified_base 22: mod_base = OTHER; note = 2'-O-methylcytidine-3'-phosphorothioate
  modified_base 23: mod_base = OTHER; note = 2'-O-methylguanosine
atcacaccaacttgaatgaagcg

SEQ ID NO: 221 - RNA, 23 nt, synthetic construct
  source 1..23: mol_type = other RNA
  modified_base 1: mod_base = OTHER; note = 2'-O-methyluridine-3'-phosphorothioate
  modified_base 2: mod_base = OTHER; note = 2'-deoxy-2'-fluoroguanosine-3'-phosphorothioate
  modified_base 3: mod_base = OTHER; note = 2'-O-methylguanosine-3'-phosphate
  modified_base 4: mod_base = OTHER; note = 2'-deoxy-2'-fluoroadenosine-3'-phosphate
  modified_base 5: mod_base = OTHER; note = 2'-O-methyladenosine-3'-phosphate
  modified_base 6: mod_base = OTHER; note = 2'-deoxy-2'-fluorocytidine-3'-phosphate
  modified_base 7: mod_base = OTHER; note = 2'-O-methyladenosine-3'-phosphate
  modified_base 8: mod_base = OTHER; note = 2'-deoxy-2'-fluoroguanosine-3'-phosphate
  modified_base 9: mod_base = OTHER; note = 2'-O-methylguanosine-3'-phosphate
  modified_base 10: mod_base = OTHER; note = 2'-deoxy-2'-fluoroadenosine-3'-phosphate
  modified_base 11: mod_base = OTHER; note = 2'-O-methylcytidine-3'-phosphate
  modified_base 12: mod_base = OTHER; note = 2'-O-methylcytidine-3'-phosphate
  modified_base 13: mod_base = OTHER; note = 2'-O-methyluridine-3'-phosphate
  modified_base 14: mod_base = OTHER; note = 2'-deoxy-2'-fluorocytidine-3'-phosphate
  modified_base 15: mod_base = OTHER; note = 2'-O-methyluridine-3'-phosphate
  modified_base 16: mod_base = OTHER; note = 2'-deoxy-2'-fluorouridine-3'-phosphate
  modified_base 17: mod_base = OTHER; note = 2'-O-methylcytidine-3'-phosphate
  modified_base 18: mod_base = OTHER; note = 2'-deoxy-2'-fluoroadenosine-3'-phosphate
  modified_base 19: mod_base = OTHER; note = 2'-O-methyladenosine-3'-phosphate
  modified_base 20: mod_base = OTHER; note = 2'-deoxy-2'-fluorouridine-3'-phosphate
  modified_base 21: mod_base = OTHER; note = 2'-O-methylcytidine-3'-phosphorothioate
  modified_base 22: mod_base = OTHER; note = 2'-O-methyluridine-3'-phosphorothioate
  modified_base 23: mod_base = OTHER; note = 2'-O-methylcytidine
tggaacaggacctcttcaatctc

SEQ ID NO: 222 - RNA, 23 nt, synthetic construct
  source 1..23: mol_type = other RNA
  modified_base 1: mod_base = OTHER; note = 2'-O-methyladenosine-3'-phosphorothioate
  modified_base 2: mod_base = OTHER; note = 2'-deoxy-2'-fluorouridine-3'-phosphorothioate
  modified_base 3: mod_base = OTHER; note = 2'-O-methylcytidine-3'-phosphate
  modified_base 4: mod_base = OTHER; note = 2'-deoxy-2'-fluoroadenosine-3'-phosphate
  modified_base 5: mod_base = OTHER; note = 2'-O-methyluridine-3'-phosphate
  modified_base 6: mod_base = OTHER; note = 2'-deoxy-2'-fluoroadenosine-3'-phosphate
  modified_base 7: mod_base = OTHER; note = 2'-O-methylguanosine-3'-phosphate
  modified_base 8: mod_base = OTHER; note = 2'-deoxy-2'-fluorocytidine-3'-phosphate
  modified_base 9: mod_base = OTHER; note = 2'-O-methyladenosine-3'-phosphate
  modified_base 10: mod_base = OTHER; note = 2'-deoxy-2'-fluorouridine-3'-phosphate
  modified_base 11: mod_base = OTHER; note = 2'-O-methyluridine-3'-phosphate
  modified_base 12: mod_base = OTHER; note = 2'-O-methylguanosine-3'-phosphate
  modified_base 13: mod_base = OTHER; note = 2'-O-methyladenosine-3'-phosphate
  modified_base 14: mod_base = OTHER; note = 2'-deoxy-2'-fluoroadenosine-3'-phosphate
  modified_base 15: mod_base = OTHER; note = 2'-O-methyladenosine-3'-phosphate
  modified_base 16: mod_base = OTHER; note = 2'-deoxy-2'-fluoroadenosine-3'-phosphate
  modified_base 17: mod_base = OTHER; note = 2'-O-methylguanosine-3'-phosphate
  modified_base 18: mod_base = OTHER; note = 2'-deoxy-2'-fluoroadenosine-3'-phosphate
  modified_base 19: mod_base = OTHER; note = 2'-O-methyladenosine-3'-phosphate
  modified_base 20: mod_base = OTHER; note = 2'-deoxy-2'-fluoroadenosine-3'-phosphate
  modified_base 21: mod_base = OTHER; note = 2'-O-methyluridine-3'-phosphorothioate
  modified_base 22: mod_base = OTHER; note = 2'-O-methylcytidine-3'-phosphorothioate
  modified_base 23: mod_base = OTHER; note = 2'-O-methyluridine
atcatagcattgaaaagaaatct

SEQ ID NO: 223 - RNA, 23 nt, synthetic construct
  source 1..23: mol_type = other RNA
  modified_base 1: mod_base = OTHER; note = 2'-O-methylcytidine-3'-phosphorothioate
  modified_base 2: mod_base = OTHER; note = 2'-deoxy-2'-fluorouridine-3'-phosphorothioate
  modified_base 3: mod_base = OTHER; note = 2'-O-methyluridine-3'-phosphate
  modified_base 4: mod_base = OTHER; note = 2'-deoxy-2'-fluorouridine-3'-phosphate
  modified_base 5: mod_base = OTHER; note = 2'-O-methyluridine-3'-phosphate
  modified_base 6: mod_base = OTHER; note = 2'-deoxy-2'-fluoroadenosine-3'-phosphate
  modified_base 7: mod_base = OTHER; note = 2'-O-methyluridine-3'-phosphate
  modified_base 8: mod_base = OTHER; note = 2'-deoxy-2'-fluoroguanosine-3'-phosphate
  modified_base 9: mod_base = OTHER; note = 2'-O-methylcytidine-3'-phosphate
  modified_base 10: mod_base = OTHER; note = 2'-deoxy-2'-fluoroadenosine-3'-phosphate
  modified_base 11: mod_base = OTHER; note = 2'-O-methyladenosine-3'-phosphate
  modified_base 12: mod_base = OTHER; note = 2'-O-methyluridine-3'-phosphate
  modified_base 13: mod_base = OTHER; note = 2'-O-methylcytidine-3'-phosphate
  modified_base 14: mod_base = OTHER; note = 2'-deoxy-2'-fluorouridine-3'-phosphate
  modified_base 15: mod_base = OTHER; note = 2'-O-methylguanosine-3'-phosphate
  modified_base 16: mod_base = OTHER; note = 2'-deoxy-2'-fluorocytidine-3'-phosphate
  modified_base 17: mod_base = OTHER; note = 2'-O-methyluridine-3'-phosphate
  modified_base 18: mod_base = OTHER; note = 2'-deoxy-2'-fluorocytidine-3'-phosphate
  modified_base 19: mod_base = OTHER; note = 2'-O-methyluridine-3'-phosphate
  modified_base 20: mod_base = OTHER; note = 2'-deoxy-2'-fluoroguanosine-3'-phosphate
  modified_base 21: mod_base = OTHER; note = 2'-O-methylguanosine-3'-phosphorothioate
  modified_base 22: mod_base = OTHER; note = 2'-O-methylcytidine-3'-phosphorothioate
  modified_base 23: mod_base = OTHER; note = 2'-O-methyladenosine
cttttatgcaatctgctctggca

SEQ ID NO: 224 - RNA, 23 nt, synthetic construct
  source 1..23: mol_type = other RNA
  modified_base 1: mod_base = OTHER; note = 2'-O-methyladenosine-3'-phosphorothioate
  modified_base 2: mod_base = OTHER; note = 2'-deoxy-2'-fluorouridine-3'-phosphorothioate
  modified_base 3: mod_base = OTHER; note = 2'-O-methyluridine-3'-phosphate
  modified_base 4: mod_base = OTHER; note = 2'-deoxy-2'-fluorouridine-3'-phosphate
  modified_base 5: mod_base = OTHER; note = 2'-O-methylguanosine-3'-phosphate
  modified_base 6: mod_base = OTHER; note = 2'-deoxy-2'-fluoroguanosine-3'-phosphate
  modified_base 7: mod_base = OTHER; note = 2'-O-methyluridine-3'-phosphate
  modified_base 8: mod_base = OTHER; note = 2'-deoxy-2'-fluorouridine-3'-phosphate
  modified_base 9: mod_base = OTHER; note = 2'-O-methylguanosine-3'-phosphate
  modified_base 10: mod_base = OTHER; note = 2'-deoxy-2'-fluoroadenosine-3'-phosphate
  modified_base 11: mod_base = OTHER; note = 2'-O-methylguanosine-3'-phosphate
  modified_base 12: mod_base = OTHER; note = 2'-O-methylcytidine-3'-phosphate
  modified_base 13: mod_base = OTHER; note = 2'-O-methyluridine-3'-phosphate
  modified_base 14: mod_base = OTHER; note = 2'-deoxy-2'-fluorouridine-3'-phosphate
  modified_base 15: mod_base = OTHER; note = 2'-O-methylcytidine-3'-phosphate
  modified_base 16: mod_base = OTHER; note = 2'-deoxy-2'-fluorouridine-3'-phosphate
  modified_base 17: mod_base = OTHER; note = 2'-O-methylcytidine-3'-phosphate
  modified_base 18: mod_base = OTHER; note = 2'-deoxy-2'-fluorouridine-3'-phosphate
  modified_base 19: mod_base = OTHER; note = 2'-O-methylguanosine-3'-phosphate
  modified_base 20: mod_base = OTHER; note = 2'-deoxy-2'-fluorouridine-3'-phosphate
  modified_base 21: mod_base = OTHER; note = 2'-O-methylguanosine-3'-phosphorothioate
  modified_base 22: mod_base = OTHER; note = 2'-O-methyladenosine-3'-phosphorothioate
  modified_base 23: mod_base = OTHER; note = 2'-O-methylcytidine
atttggttgagcttctctgtgac

SEQ ID NO: 225 - RNA, 21 nt, synthetic construct
  source 1..21: mol_type = other RNA
cgtggtcaaggtcttctctct

SEQ ID NO: 226 - RNA, 21 nt, synthetic construct
  source 1..21: mol_type = other RNA
acgtggtcaaggtcttctcta

SEQ ID NO: 227 - RNA, 21 nt, synthetic construct
  source 1..21: mol_type = other RNA
tttgacctcatggtgttcgtg

SEQ ID NO: 228 - RNA, 21 nt, synthetic construct
  source 1..21: mol_type = other RNA
ggagaattgcttcatacaaaa

SEQ ID NO: 229 - RNA, 21 nt, synthetic construct
  source 1..21: mol_type = other RNA
tgttaaatggctgatcctgga

SEQ ID NO: 230 - RNA, 21 nt, synthetic construct
  source 1..21: mol_type = other RNA
gacagacaagaccatctacac

SEQ ID NO: 231 - RNA, 21 nt, synthetic construct
  source 1..21: mol_type = other RNA
ccagacagacaagaccatcta

SEQ ID NO: 232 - RNA, 21 nt, synthetic construct
  source 1..21: mol_type = other RNA
ccagatccacttcaccaagaa

SEQ ID NO: 233 - RNA, 21 nt, synthetic construct
  source 1..21: mol_type = other RNA
ttgacctcatggtgttcgtga

SEQ ID NO: 234 - RNA, 21 nt, synthetic construct
  source 1..21: mol_type = other RNA
ccccttcgaggtcacagtaat

SEQ ID NO: 235 - RNA, 21 nt, synthetic construct
  source 1..21: mol_type = other RNA
atgaacaaaactgtggctgtt

SEQ ID NO: 236 - RNA, 21 nt, synthetic construct
  source 1..21: mol_type = other RNA
agacagacaagaccatctaca

SEQ ID NO: 237 - RNA, 21 nt, synthetic construct
  source 1..21: mol_type = other RNA
ccagatccacttcaccaagac

SEQ ID NO: 238 - RNA, 21 nt, synthetic construct
  source 1..21: mol_type = other RNA
agggatctgtgtggcagacca

SEQ ID NO: 239 - RNA, 21 nt, synthetic construct
  source 1..21: mol_type = other RNA
gacaagaccatctacacccct

SEQ ID NO: 240 - RNA, 21 nt, synthetic construct
  source 1..21: mol_type = other RNA
gctgaggagaattgcttcata

SEQ ID NO: 241 - RNA, 21 nt, synthetic construct
  source 1..21: mol_type = other RNA
acgtggtcaaggtcttctctc

SEQ ID NO: 242 - RNA, 21 nt, synthetic construct
  source 1..21: mol_type = other RNA
ggatctgtgtggcagacccct

SEQ ID NO: 243 - RNA, 21 nt, synthetic construct
  source 1..21: mol_type = other RNA
acagacaagaccatctacaca

SEQ ID NO: 244 - RNA, 21 nt, synthetic construct
  source 1..21: mol_type = other RNA
atccagacagacaagaccatt

SEQ ID NO: 245 - RNA, 21 nt, synthetic construct
  source 1..21: mol_type = other RNA
ctccgtgtgggtggacgtcaa

SEQ ID NO: 246 - RNA, 21 nt, synthetic construct
  source 1..21: mol_type = other RNA
tccagacagacaagaccatct

SEQ ID NO: 247 - RNA, 21 nt, synthetic construct
  source 1..21: mol_type = other RNA
agggatctgtgtggcagaccc

SEQ ID NO: 248 - RNA, 21 nt, synthetic construct
  source 1..21: mol_type = other RNA
caagaaagggatctgtgtgga

SEQ ID NO: 249 - RNA, 21 nt, synthetic construct
  source 1..21: mol_type = other RNA
tgacctcatggtgttcgtgat

SEQ ID NO: 250 - RNA, 21 nt, synthetic construct
  source 1..21: mol_type = other RNA
gcagctaaaagactttgactt

SEQ ID NO: 251 - RNA, 21 nt, synthetic construct
  source 1..21: mol_type = other RNA
catccagacagacaagaccat

SEQ ID NO: 252 - RNA, 21 nt, synthetic construct
  source 1..21: mol_type = other RNA
acagacaagaccatctacacc

SEQ ID NO: 253 - RNA, 21 nt, synthetic construct
  source 1..21: mol_type = other RNA
atccagacagacaagaccatc

SEQ ID NO: 254 - RNA, 21 nt, synthetic construct
  source 1..21: mol_type = other RNA
tttgacctcatggtgttcgtt

SEQ ID NO: 255 - RNA, 21 nt, synthetic construct
  source 1..21: mol_type = other RNA
ggatgccaagaacactatgat

SEQ ID NO: 256 - RNA, 21 nt, synthetic construct
  source 1..21: mol_type = other RNA
aagaaagggatctgtgtggca

SEQ ID NO: 257 - RNA, 21 nt, synthetic construct
  source 1..21: mol_type = other RNA
caagaaagggatctgtgtggc

SEQ ID NO: 258 - RNA, 21 nt, synthetic construct
  source 1..21: mol_type = other RNA
tacgtggtcaaggtcttctct

SEQ ID NO: 259 - RNA, 21 nt, synthetic construct
  source 1..21: mol_type = other RNA
cagtttcgaggtcatagtgga

SEQ ID NO: 260 - RNA, 21 nt, synthetic construct
  source 1..21: mol_type = other RNA
cgtgccggaaggaatcagaat

SEQ ID NO: 261 - RNA, 21 nt, synthetic construct
  source 1..21: mol_type = other RNA
gaaagggatctgtgtggcaga

SEQ ID NO: 262 - RNA, 21 nt, synthetic construct
  source 1..21: mol_type = other RNA
gacagacaagaccatctacaa

SEQ ID NO: 263 - RNA, 21 nt, synthetic construct
  source 1..21: mol_type = other RNA
tgacctcatggtgttcgtgac

SEQ ID NO: 264 - RNA, 21 nt, synthetic construct
  source 1..21: mol_type = other RNA
tgtaataaattcgacctcaag

SEQ ID NO: 265 - RNA, 21 nt, synthetic construct
  source 1..21: mol_type = other RNA
aactacatgaacctacagaga

SEQ ID NO: 266 - RNA, 23 nt, synthetic construct
  source 1..23: mol_type = other RNA
agagagaagaccttgaccacgta

SEQ ID NO: 267 - RNA, 23 nt, synthetic construct
  source 1..23: mol_type = other RNA
tagagaagaccttgaccacgtag

SEQ ID NO: 268 - RNA, 23 nt, synthetic construct
  source 1..23: mol_type = other RNA
cacgaacaccatgaggtcaaagg

SEQ ID NO: 269 - RNA, 23 nt, synthetic construct
  source 1..23: mol_type = other RNA
ttttgtatgaagcaattctcctc

SEQ ID NO: 270 - RNA, 23 nt, synthetic construct
  source 1..23: mol_type = other RNA
tccaggatcagccatttaacagc

SEQ ID NO: 271 - RNA, 23 nt, synthetic construct
  source 1..23: mol_type = other RNA
gtgtagatggtcttgtctgtctg

SEQ ID NO: 272 - RNA, 23 nt, synthetic construct
  source 1..23: mol_type = other RNA
tagatggtcttgtctgtctggat

SEQ ID NO: 273 - RNA, 23 nt, synthetic construct
  source 1..23: mol_type = other RNA
ttcttggtgaagtggatctggta

SEQ ID NO: 274 - RNA, 23 nt, synthetic construct
  source 1..23: mol_type = other RNA
tcacgaacaccatgaggtcaaag

SEQ ID NO: 275 - RNA, 23 nt, synthetic construct
  source 1..23: mol_type = other RNA
attactgtgacctcgaaggggtc

SEQ ID NO: 276 - RNA, 23 nt, synthetic construct
  source 1..23: mol_type = other RNA
aacagccacagttttgttcattc

SEQ ID NO: 277 - RNA, 23 nt, synthetic construct
  source 1..23: mol_type = other RNA
tgtagatggtcttgtctgtctgg

SEQ ID NO: 278 - RNA, 23 nt, synthetic construct
  source 1..23: mol_type = other RNA
gtcttggtgaagtggatctggta

SEQ ID NO: 279 - RNA, 23 nt, synthetic construct
  source 1..23: mol_type = other RNA
tggtctgccacacagatcccttt

SEQ ID NO: 280 - RNA, 23 nt, synthetic construct
  source 1..23: mol_type = other RNA
aggggtgtagatggtcttgtctg

SEQ ID NO: 281 - RNA, 23 nt, synthetic construct
  source 1..23: mol_type = other RNA
tatgaagcaattctcctcagcac

SEQ ID NO: 282 - RNA, 23 nt, synthetic construct
  source 1..23: mol_type = other RNA
gagagaagaccttgaccacgtag

SEQ ID NO: 283 - RNA, 23 nt, synthetic construct
  source 1..23: mol_type = other RNA
aggggtctgccacacagatccct

SEQ ID NO: 284 - RNA, 23 nt, synthetic construct
  source 1..23: mol_type = other RNA
tgtgtagatggtcttgtctgtct

SEQ ID NO: 285 - RNA, 23 nt, synthetic construct
  source 1..23: mol_type = other RNA
aatggtcttgtctgtctggatga

SEQ ID NO: 286 - RNA, 23 nt, synthetic construct
  source 1..23: mol_type = other RNA
ttgacgtccacccacacggagtc

SEQ ID NO: 287 - RNA, 23 nt, synthetic construct
  source 1..23: mol_type = other RNA
agatggtcttgtctgtctggatg

SEQ ID NO: 288 - RNA, 23 nt, synthetic construct
  source 1..23: mol_type = other RNA
gggtctgccacacagatcccttt

SEQ ID NO: 289 - RNA, 23 nt, synthetic construct
  source 1..23: mol_type = other RNA
tccacacagatccctttcttgtc

SEQ ID NO: 290 - RNA, 23 nt, synthetic construct
  source 1..23: mol_type = other RNA
atcacgaacaccatgaggtcaaa

SEQ ID NO: 291 - RNA, 23 nt, synthetic construct
  source 1..23: mol_type = other RNA
aagtcaaagtcttttagctgcag

SEQ ID NO: 292 - RNA, 23 nt, synthetic construct
  source 1..23: mol_type = other RNA
atggtcttgtctgtctggatgaa

SEQ ID NO: 293 - RNA, 23 nt, synthetic construct
  source 1..23: mol_type = other RNA
ggtgtagatggtcttgtctgtct

SEQ ID NO: 294 - RNA, 23 nt, synthetic construct
  source 1..23: mol_type = other RNA
gatggtcttgtctgtctggatga

SEQ ID NO: 295 - RNA, 23 nt, synthetic construct
  source 1..23: mol_type = other RNA
aacgaacaccatgaggtcaaagg

SEQ ID NO: 296 - RNA, 23 nt, synthetic construct
  source 1..23: mol_type = other RNA
atcatagtgttcttggcatcctg

SEQ ID NO: 297 - RNA, 23 nt, synthetic construct
  source 1..23: mol_type = other RNA
tgccacacagatccctttcttgt

SEQ ID NO: 298 - RNA, 23 nt, synthetic construct
  source 1..23: mol_type = other RNA
gccacacagatccctttcttgtc

SEQ ID NO: 299 - RNA, 23 nt, synthetic construct
  source 1..23: mol_type = other RNA
agagaagaccttgaccacgtagg

SEQ ID NO: 300 - RNA, 23 nt, synthetic construct
  source 1..23: mol_type = other RNA
tccactatgacctcgaaactggg

SEQ ID NO: 301 - RNA, 23 nt, synthetic construct
  source 1..23: mol_type = other RNA
attctgattccttccggcacgac

SEQ ID NO: 302 - RNA, 23 nt, synthetic construct
  source 1..23: mol_type = other RNA
tctgccacacagatccctttctt

SEQ ID NO: 303 - RNA, 23 nt, synthetic construct
  source 1..23: mol_type = other RNA
ttgtagatggtcttgtctgtctg

SEQ ID NO: 304 - RNA, 23 nt, synthetic construct
  source 1..23: mol_type = other RNA
gtcacgaacaccatgaggtcaaa

SEQ ID NO: 305 - RNA, 23 nt, synthetic construct
  source 1..23: mol_type = other RNA
cttgaggtcgaatttattacagg

SEQ ID NO: 306 - RNA, 23 nt, synthetic construct
  source 1..23: mol_type = other RNA
tctctgtaggttcatgtagttgg

SEQ ID NO: 307 - RNA, 21 nt, synthetic construct
  source 1..21: mol_type = other RNA
  modified_base 1: mod_base = OTHER; note = 2'-deoxy-2'-fluorocytidine-3'-phosphorothioate
  modified_base 2: mod_base = OTHER; note = 2'-O-methylguanosine-3'-phosphorothioate
  modified_base 3: mod_base = OTHER; note = 2'-deoxy-2'-fluorouridine-3'-phosphate
  modified_base 4: mod_base = OTHER; note = 2'-O-methylguanosine-3'-phosphate
  modified_base 5: mod_base = OTHER; note = 2'-deoxy-2'-fluoroguanosine-3'-phosphate
  modified_base 6: mod_base = OTHER; note = 2'-O-methyluridine-3'-phosphate
  modified_base 7: mod_base = OTHER; note = 2'-deoxy-2'-fluorocytidine-3'-phosphate
  modified_base 8: mod_base = OTHER; note = 2'-O-methyladenosine-3'-phosphate
  modified_base 9: mod_base = OTHER; note = 2'-deoxy-2'-fluoroadenosine-3'-phosphate
  modified_base 10: mod_base = OTHER; note = 2'-deoxy-2'-fluoroguanosine-3'-phosphate
  modified_base 11: mod_base = OTHER; note = 2'-deoxy-2'-fluoroguanosine-3'-phosphate
  modified_base 12: mod_base = OTHER; note = 2'-O-methyluridine-3'-phosphate
  modified_base 13: mod_base = OTHER; note = 2'-deoxy-2'-fluorocytidine-3'-phosphate
  modified_base 14: mod_base = OTHER; note = 2'-O-methyluridine-3'-phosphate
  modified_base 15: mod_base = OTHER; note = 2'-deoxy-2'-fluorouridine-3'-phosphate
  modified_base 16: mod_base = OTHER; note = 2'-O-methylcytidine-3'-phosphate
  modified_base 17: mod_base = OTHER; note = 2'-deoxy-2'-fluorouridine-3'-phosphate
  modified_base 18: mod_base = OTHER; note = 2'-O-methylcytidine-3'-phosphate
  modified_base 19: mod_base = OTHER; note = 2'-deoxy-2'-fluorouridine-3'-phosphate
  modified_base 20: mod_base = OTHER; note = 2'-O-methylcytidine-3'-phosphate
  modified_base 21: mod_base = OTHER; note = 2'-deoxy-2'-fluorouridine-3'-phosphate ((2S,4R)-1-[29-[[2-(acetylamino)-2-deoxy-beta-D-galactopyra nosyl]oxy]-14,14-bis[[3-[[3-[[5-[[2-(acetylamino)-2-deoxy-b eta-D-galactopyranosyl]oxy]-1-oxopentyl]amino]propyl]amino] -3-oxopropoxy]methyl]-1,12,19,25-tetraoxo-16-oxa-13,20,24-t riazanonacos-1-yl]-4-hydroxy-2-pyrrolidinyl)methyl ester
cgtggtcaaggtcttctctct

SEQ ID NO: 308 - RNA, 21 nt, synthetic construct
  source 1..21: mol_type = other RNA
  modified_base 1: mod_base = OTHER; note = 2'-deoxy-2'-fluoroadenosine-3'-phosphorothioate
  modified_base 2: mod_base = OTHER; note = 2'-O-methylcytidine-3'-phosphorothioate
  modified_base 3: mod_base = OTHER; note = 2'-deoxy-2'-fluoroguanosine-3'-phosphate
  modified_base 4: mod_base = OTHER; note = 2'-O-methyluridine-3'-phosphate
  modified_base 5: mod_base = OTHER; note = 2'-deoxy-2'-fluoroguanosine-3'-phosphate
  modified_base 6: mod_base = OTHER; note = 2'-O-methylguanosine-3'-phosphate
  modified_base 7: mod_base = OTHER; note = 2'-deoxy-2'-fluorouridine-3'-phosphate
  modified_base 8: mod_base = OTHER; note = 2'-O-methylcytidine-3'-phosphate
  modified_base 9: mod_base = OTHER; note = 2'-deoxy-2'-fluoroadenosine-3'-phosphate
  modified_base 10: mod_base = OTHER; note = 2'-deoxy-2'-fluoroadenosine-3'-phosphate
  modified_base 11: mod_base = OTHER; note = 2'-deoxy-2'-fluoroguanosine-3'-phosphate
  modified_base 12: mod_base = OTHER; note = 2'-O-methylguanosine-3'-phosphate
  modified_base 13: mod_base = OTHER; note = 2'-deoxy-2'-fluorouridine-3'-phosphate
  modified_base 14: mod_base = OTHER; note = 2'-O-methylcytidine-3'-phosphate
  modified_base 15: mod_base = OTHER; note = 2'-deoxy-2'-fluorouridine-3'-phosphate
  modified_base 16: mod_base = OTHER; note = 2'-O-methyluridine-3'-phosphate
  modified_base 17: mod_base = OTHER; note = 2'-deoxy-2'-fluorocytidine-3'-phosphate
  modified_base 18: mod_base = OTHER; note = 2'-O-methyluridine-3'-phosphate
  modified_base 19: mod_base = OTHER; note = 2'-deoxy-2'-fluorocytidine-3'-phosphate
  modified_base 20: mod_base = OTHER; note = 2'-O-methyluridine-3'-phosphate
  modified_base 21: mod_base = OTHER; note = 2'-deoxy-2'-fluoroadenosine-3'-phosphate ((2S,4R)-1-[29-[[2-(acetylamino)-2-deoxy-beta-D-galactopyra nosyl]oxy]-14,14-bis[[3-[[3-[[5-[[2-(acetylamino)-2-deoxy-b eta-D-galactopyranosyl]oxy]-1-oxopentyl]amino]propyl]amino] -3-oxopropoxy]methyl]-1,12,19,25-tetraoxo-16-oxa-13,20,24-t riazanonacos-1-yl]-4-hydroxy-2-pyrrolidinyl)methyl ester
acgtggtcaaggtcttctcta

SEQ ID NO: 309 - RNA, 21 nt, synthetic construct
  source 1..21: mol_type = other RNA
  modified_base 1: mod_base = OTHER; note = 2'-deoxy-2'-fluorouridine-3'-phosphorothioate
  modified_base 2: mod_base = OTHER; note = 2'-O-methyluridine-3'-phosphorothioate
  modified_base 3: mod_base = OTHER; note = 2'-deoxy-2'-fluorouridine-3'-phosphate
  modified_base 4: mod_base = OTHER; note = 2'-O-methylguanosine-3'-phosphate
  modified_base 5: mod_base = OTHER; note = 2'-deoxy-2'-fluoroadenosine-3'-phosphate
  modified_base 6: mod_base = OTHER; note = 2'-O-methylcytidine-3'-phosphate
  modified_base 7: mod_base = OTHER; note = 2'-deoxy-2'-fluorocytidine-3'-phosphate
  modified_base 8: mod_base = OTHER; note = 2'-O-methyluridine-3'-phosphate
  modified_base 9: mod_base = OTHER; note = 2'-deoxy-2'-fluorocytidine-3'-phosphate
  modified_base 10: mod_base = OTHER; note = 2'-deoxy-2'-fluoroadenosine-3'-phosphate
  modified_base 11: mod_base = OTHER; note = 2'-deoxy-2'-fluorouridine-3'-phosphate
  modified_base 12: mod_base = OTHER; note = 2'-O-methylguanosine-3'-phosphate
  modified_base 13: mod_base = OTHER; note = 2'-deoxy-2'-fluoroguanosine-3'-phosphate
  modified_base 14: mod_base = OTHER; note = 2'-O-methyluridine-3'-phosphate
  modified_base 15: mod_base = OTHER; note = 2'-deoxy-2'-fluoroguanosine-3'-phosphate
  modified_base 16: mod_base = OTHER; note = 2'-O-methyluridine-3'-phosphate
  modified_base 17: mod_base = OTHER; note = 2'-deoxy-2'-fluorouridine-3'-phosphate
  modified_base 18: mod_base = OTHER; note = 2'-O-methylcytidine-3'-phosphate
  modified_base 19: mod_base = OTHER; note = 2'-deoxy-2'-fluoroguanosine-3'-phosphate
  modified_base 20: mod_base = OTHER; note = 2'-O-methyluridine-3'-phosphate
  modified_base 21: mod_base = OTHER; note = 2'-deoxy-2'-fluoroguanosine-3'-phosphate ((2S,4R)-1-[29-[[2-(acetylamino)-2-deoxy-beta-D-galactopyra nosyl]oxy]-14,14-bis[[3-[[3-[[5-[[2-(acetylamino)-2-deoxy-b eta-D-galactopyranosyl]oxy]-1-oxopentyl]amino]propyl]amino] -3-oxopropoxy]methyl]-1,12,19,25-tetraoxo-16-oxa-13,20,24-t riazanonacos-1-yl]-4-hydroxy-2-pyrrolidinyl)methyl ester
tttgacctcatggtgttcgtg

SEQ ID NO: 310 - RNA, 21 nt, synthetic construct
  source 1..21: mol_type = other RNA
  modified_base 1: mod_base = OTHER; note = 2'-deoxy-2'-fluoroguanosine-3'-phosphorothioate
  modified_base 2: mod_base = OTHER; note = 2'-O-methylguanosine-3'-phosphorothioate
  modified_base 3: mod_base = OTHER; note = 2'-deoxy-2'-fluoroadenosine-3'-phosphate
  modified_base 4: mod_base = OTHER; note = 2'-O-methylguanosine-3'-phosphate
  modified_base 5: mod_base = OTHER; note = 2'-deoxy-2'-fluoroadenosine-3'-phosphate
  modified_base 6: mod_base = OTHER; note = 2'-O-methyladenosine-3'-phosphate
  modified_base 7: mod_base = OTHER; note = 2'-deoxy-2'-fluorouridine-3'-phosphate
  modified_base 8: mod_base = OTHER; note = 2'-O-methyluridine-3'-phosphate
  modified_base 9: mod_base = OTHER; note = 2'-deoxy-2'-fluoroguanosine-3'-phosphate
  modified_base 10: mod_base = OTHER; note = 2'-deoxy-2'-fluorocytidine-3'-phosphate
  modified_base 11: mod_base = OTHER; note = 2'-deoxy-2'-fluorouridine-3'-phosphate
  modified_base 12: mod_base = OTHER; note = 2'-O-methyluridine-3'-phosphate
  modified_base 13: mod_base = OTHER; note = 2'-deoxy-2'-fluorocytidine-3'-phosphate
  modified_base 14: mod_base = OTHER; note = 2'-O-methyladenosine-3'-phosphate
  modified_base 15: mod_base = OTHER; note = 2'-deoxy-2'-fluorouridine-3'-phosphate
  modified_base 16: mod_base = OTHER; note = 2'-O-methyladenosine-3'-phosphate
  modified_base 17: mod_base = OTHER; note = 2'-deoxy-2'-fluorocytidine-3'-phosphate
  modified_base 18: mod_base = OTHER; note = 2'-O-methyladenosine-3'-phosphate
  modified_base 19: mod_base = OTHER; note = 2'-deoxy-2'-fluoroadenosine-3'-phosphate
  modified_base 20: mod_base = OTHER; note = 2'-O-methyladenosine-3'-phosphate
  modified_base 21: mod_base = OTHER; note = 2'-deoxy-2'-fluoroadenosine-3'-phosphate ((2S,4R)-1-[29-[[2-(acetylamino)-2-deoxy-beta-D-galactopyra nosyl]oxy]-14,14-bis[[3-[[3-[[5-[[2-(acetylamino)-2-deoxy-b eta-D-galactopyranosyl]oxy]-1-oxopentyl]amino]propyl]amino] -3-oxopropoxy]methyl]-1,12,19,25-tetraoxo-16-oxa-13,20,24-t riazanonacos-1-yl]-4-hydroxy-2-pyrrolidinyl)methyl ester
ggagaattgcttcatacaaaa

SEQ ID NO: 311 - RNA, 21 nt, synthetic construct
  source 1..21: mol_type = other RNA
  modified_base 1: mod_base = OTHER; note = 2'-deoxy-2'-fluorouridine-3'-phosphorothioate
  modified_base 2: mod_base = OTHER; note = 2'-O-methylguanosine-3'-phosphorothioate
  modified_base 3: mod_base = OTHER; note = 2'-deoxy-2'-fluorouridine-3'-phosphate
  modified_base 4: mod_base = OTHER; note = 2'-O-methyluridine-3'-phosphate
  modified_base 5: mod_base = OTHER; note = 2'-deoxy-2'-fluoroadenosine-3'-phosphate
  modified_base 6: mod_base = OTHER; note = 2'-O-methyladenosine-3'-phosphate
  modified_base 7: mod_base = OTHER; note = 2'-deoxy-2'-fluoroadenosine-3'-phosphate
  modified_base 8: mod_base = OTHER; note = 2'-O-methyluridine-3'-phosphate
  modified_base 9: mod_base = OTHER; note = 2'-deoxy-2'-fluoroguanosine-3'-phosphate
  modified_base 10: mod_base = OTHER; note = 2'-deoxy-2'-fluoroguanosine-3'-phosphate
  modified_base 11: mod_base = OTHER; note = 2'-deoxy-2'-fluorocytidine-3'-phosphate
  modified_base 12: mod_base = OTHER; note = 2'-O-methyluridine-3'-phosphate
  modified_base 13: mod_base = OTHER; note = 2'-deoxy-2'-fluoroguanosine-3'-phosphate
  modified_base 14: mod_base = OTHER; note = 2'-O-methyladenosine-3'-phosphate
  modified_base 15: mod_base = OTHER; note = 2'-deoxy-2'-fluorouridine-3'-phosphate
  modified_base 16: mod_base = OTHER; note = 2'-O-methylcytidine-3'-phosphate
  modified_base 17: mod_base = OTHER; note = 2'-deoxy-2'-fluorocytidine-3'-phosphate
  modified_base 18: mod_base = OTHER; note = 2'-O-methyluridine-3'-phosphate
  modified_base 19: mod_base = OTHER; note = 2'-deoxy-2'-fluoroguanosine-3'-phosphate
  modified_base 20: mod_base = OTHER; note = 2'-O-methylguanosine-3'-phosphate
  modified_base 21: mod_base = OTHER; note = 2'-deoxy-2'-fluoroadenosine-3'-phosphate ((2S,4R)-1-[29-[[2-(acetylamino)-2-deoxy-beta-D-galactopyra nosyl]oxy]-14,14-bis[[3-[[3-[[5-[[2-(acetylamino)-2-deoxy-b eta-D-galactopyranosyl]oxy]-1-oxopentyl]amino]propyl]amino] -3-oxopropoxy]methyl]-1,12,19,25-tetraoxo-16-oxa-13,20,24-t riazanonacos-1-yl]-4-hydroxy-2-pyrrolidinyl)methyl ester
tgttaaatggctgatcctgga

SEQ ID NO: 312 - RNA, 21 nt, synthetic construct
  source 1..21: mol_type = other RNA
  modified_base 1: mod_base = OTHER; note = 2'-deoxy-2'-fluoroguanosine-3'-phosphorothioate
  modified_base 2: mod_base = OTHER; note = 2'-O-methyladenosine-3'-phosphorothioate
  modified_base 3: mod_base = OTHER; note = 2'-deoxy-2'-fluorocytidine-3'-phosphate
  modified_base 4: mod_base = OTHER; note = 2'-O-methyladenosine-3'-phosphate
  modified_base 5: mod_base = OTHER; note = 2'-deoxy-2'-fluoroguanosine-3'-phosphate
  modified_base 6: mod_base = OTHER; note = 2'-O-methyladenosine-3'-phosphate
  modified_base 7: mod_base = OTHER; note = 2'-deoxy-2'-fluorocytidine-3'-phosphate
  modified_base 8: mod_base = OTHER; note = 2'-O-methyladenosine-3'-phosphate
  modified_base 9: mod_base = OTHER; note = 2'-deoxy-2'-fluoroadenosine-3'-phosphate
  modified_base 10: mod_base = OTHER; note = 2'-deoxy-2'-fluoroguanosine-3'-phosphate
  modified_base 11: mod_base = OTHER; note = 2'-deoxy-2'-fluoroadenosine-3'-phosphate
  modified_base 12: mod_base = OTHER; note = 2'-O-methylcytidine-3'-phosphate
  modified_base 13: mod_base = OTHER; note = 2'-deoxy-2'-fluorocytidine-3'-phosphate
  modified_base 14: mod_base = OTHER; note = 2'-O-methyladenosine-3'-phosphate
  modified_base 15: mod_base = OTHER; note = 2'-deoxy-2'-fluorouridine-3'-phosphate
  modified_base 16: mod_base = OTHER; note = 2'-O-methylcytidine-3'-phosphate
  modified_base 17: mod_base = OTHER; note = 2'-deoxy-2'-fluorouridine-3'-phosphate
  modified_base 18: mod_base = OTHER; note = 2'-O-methyladenosine-3'-phosphate
  modified_base 19: mod_base = OTHER; note = 2'-deoxy-2'-fluorocytidine-3'-phosphate
  modified_base 20: mod_base = OTHER; note = 2'-O-methyladenosine-3'-phosphate
  modified_base 21: mod_base = OTHER; note = 2'-deoxy-2'-fluorocytidine-3'-phosphate ((2S,4R)-1-[29-[[2-(acetylamino)-2-deoxy-beta-D-galactopyra nosyl]oxy]-14,14-bis[[3-[[3-[[5-[[2-(acetylamino)-2-deoxy-b eta-D-galactopyranosyl]oxy]-1-oxopentyl]amino]propyl]amino] -3-oxopropoxy]methyl]-1,12,19,25-tetraoxo-16-oxa-13,20,24-t riazanonacos-1-yl]-4-hydroxy-2-pyrrolidinyl)methyl ester
gacagacaagaccatctacac

SEQ ID NO: 313 - RNA, 21 nt, synthetic construct
  source 1..21: mol_type = other RNA
  modified_base 1: mod_base = OTHER; note = 2'-deoxy-2'-fluorocytidine-3'-phosphorothioate
  modified_base 2: mod_base = OTHER; note = 2'-O-methylcytidine-3'-phosphorothioate
  modified_base 3: mod_base = OTHER; note = 2'-deoxy-2'-fluoroadenosine-3'-phosphate
  modified_base 4: mod_base = OTHER; note = 2'-O-methylguanosine-3'-phosphate
  modified_base 5: mod_base = OTHER; note = 2'-deoxy-2'-fluoroadenosine-3'-phosphate
  modified_base 6: mod_base = OTHER; note = 2'-O-methylcytidine-3'-phosphate
  modified_base 7: mod_base = OTHER; note = 2'-deoxy-2'-fluoroadenosine-3'-phosphate
  modified_base 8: mod_base = OTHER; note = 2'-O-methylguanosine-3'-phosphate
  modified_base 9: mod_base = OTHER; note = 2'-deoxy-2'-fluoroadenosine-3'-phosphate
  modified_base 10: mod_base = OTHER; note = 2'-deoxy-2'-fluorocytidine-3'-phosphate
  modified_base 11: mod_base = OTHER; note = 2'-deoxy-2'-fluoroadenosine-3'-phosphate
  modified_base 12: mod_base = OTHER; note = 2'-O-methyladenosine-3'-phosphate
  modified_base 13: mod_base = OTHER; note = 2'-deoxy-2'-fluoroguanosine-3'-phosphate
  modified_base 14: mod_base = OTHER; note = 2'-O-methyladenosine-3'-phosphate
  modified_base 15: mod_base = OTHER; note = 2'-deoxy-2'-fluorocytidine-3'-phosphate
  modified_base 16: mod_base = OTHER; note = 2'-O-methylcytidine-3'-phosphate
  modified_base 17: mod_base = OTHER; note = 2'-deoxy-2'-fluoroadenosine-3'-phosphate
  modified_base 18: mod_base = OTHER; note = 2'-O-methyluridine-3'-phosphate
  modified_base 19: mod_base = OTHER; note = 2'-deoxy-2'-fluorocytidine-3'-phosphate
  modified_base 20: mod_base = OTHER; note = 2'-O-methyluridine-3'-phosphate
  modified_base 21: mod_base = OTHER; note = 2'-deoxy-2'-fluoroadenosine-3'-phosphate ((2S,4R)-1-[29-[[2-(acetylamino)-2-deoxy-beta-D-galactopyra nosyl]oxy]-14,14-bis[[3-[[3-[[5-[[2-(acetylamino)-2-deoxy-b eta-D-galactopyranosyl]oxy]-1-oxopentyl]amino]propyl]amino] -3-oxopropoxy]methyl]-1,12,19,25-tetraoxo-16-oxa-13,20,24-t riazanonacos-1-yl]-4-hydroxy-2-pyrrolidinyl)methyl ester
ccagacagacaagaccatcta

SEQ ID NO: 314 - RNA, 21 nt, synthetic construct
  source 1..21: mol_type = other RNA
  modified_base 1: mod_base = OTHER; note = 2'-deoxy-2'-fluorocytidine-3'-phosphorothioate
  modified_base 2: mod_base = OTHER; note = 2'-O-methylcytidine-3'-phosphorothioate
  modified_base 3: mod_base = OTHER; note = 2'-deoxy-2'-fluoroadenosine-3'-phosphate
  modified_base 4: mod_base = OTHER; note = 2'-O-methylguanosine-3'-phosphate
  modified_base 5: mod_base = OTHER; note = 2'-deoxy-2'-fluoroadenosine-3'-phosphate
  modified_base 6: mod_base = OTHER; note = 2'-O-methyluridine-3'-phosphate
  modified_base 7: mod_base = OTHER; note = 2'-deoxy-2'-fluorocytidine-3'-phosphate
  modified_base 8: mod_base = OTHER; note = 2'-O-methylcytidine-3'-phosphate
  modified_base 9: mod_base = OTHER; note = 2'-deoxy-2'-fluoroadenosine-3'-phosphate
  modified_base 10: mod_base = OTHER; note = 2'-deoxy-2'-fluorocytidine-3'-phosphate
  modified_base 11: mod_base = OTHER; note = 2'-deoxy-2'-fluorouridine-3'-phosphate
  modified_base 12: mod_base = OTHER; note = 2'-O-methyluridine-3'-phosphate
  modified_base 13: mod_base = OTHER; note = 2'-deoxy-2'-fluorocytidine-3'-phosphate
  modified_base 14: mod_base = OTHER; note = 2'-O-methyladenosine-3'-phosphate
  modified_base 15: mod_base = OTHER; note = 2'-deoxy-2'-fluorocytidine-3'-phosphate
  modified_base 16: mod_base = OTHER; note = 2'-O-methylcytidine-3'-phosphate
  modified_base 17: mod_base = OTHER; note = 2'-deoxy-2'-fluoroadenosine-3'-phosphate
  modified_base 18: mod_base = OTHER; note = 2'-O-methyladenosine-3'-phosphate
  modified_base 19: mod_base = OTHER; note = 2'-deoxy-2'-fluoroguanosine-3'-phosphate
  modified_base 20: mod_base = OTHER; note = 2'-O-methyladenosine-3'-phosphate
  modified_base 21: mod_base = OTHER; note = 2'-deoxy-2'-fluoroadenosine-3'-phosphate ((2S,4R)-1-[29-[[2-(acetylamino)-2-deoxy-beta-D-galactopyra nosyl]oxy]-14,14-bis[[3-[[3-[[5-[[2-(acetylamino)-2-deoxy-b eta-D-galactopyranosyl]oxy]-1-oxopentyl]amino]propyl]amino] -3-oxopropoxy]methyl]-1,12,19,25-tetraoxo-16-oxa-13,20,24-t riazanonacos-1-yl]-4-hydroxy-2-pyrrolidinyl)methyl ester
ccagatccacttcaccaagaa

SEQ ID NO: 315 - RNA, 21 nt, synthetic construct
  source 1..21: mol_type = other RNA
  modified_base 1: mod_base = OTHER; note = 2'-deoxy-2'-fluorouridine-3'-phosphorothioate
  modified_base 2: mod_base = OTHER; note = 2'-O-methyluridine-3'-phosphorothioate
  modified_base 3: mod_base = OTHER; note = 2'-deoxy-2'-fluoroguanosine-3'-phosphate
  modified_base 4: mod_base = OTHER; note = 2'-O-methyladenosine-3'-phosphate
  modified_base 5: mod_base = OTHER; note = 2'-deoxy-2'-fluorocytidine-3'-phosphate
  modified_base 6: mod_base = OTHER; note = 2'-O-methylcytidine-3'-phosphate
  modified_base 7: mod_base = OTHER; note = 2'-deoxy-2'-fluorouridine-3'-phosphate
  modified_base 8: mod_base = OTHER; note = 2'-O-methylcytidine-3'-phosphate
  modified_base 9: mod_base = OTHER; note = 2'-deoxy-2'-fluoroadenosine-3'-phosphate
  modified_base 10: mod_base = OTHER; note = 2'-deoxy-2'-fluorouridine-3'-phosphate
  modified_base 11: mod_base = OTHER; note = 2'-deoxy-2'-fluoroguanosine-3'-phosphate
  modified_base 12: mod_base = OTHER; note = 2'-O-methylguanosine-3'-phosphate
  modified_base 13: mod_base = OTHER; note = 2'-deoxy-2'-fluorouridine-3'-phosphate
  modified_base 14: mod_base = OTHER; note = 2'-O-methylguanosine-3'-phosphate
  modified_base 15: mod_base = OTHER; note = 2'-deoxy-2'-fluorouridine-3'-phosphate
  modified_base 16: mod_base = OTHER; note = 2'-O-methyluridine-3'-phosphate
  modified_base 17: mod_base = OTHER; note = 2'-deoxy-2'-fluorocytidine-3'-phosphate
  modified_base 18: mod_base = OTHER; note = 2'-O-methylguanosine-3'-phosphate
  modified_base 19: mod_base = OTHER; note = 2'-deoxy-2'-fluorouridine-3'-phosphate
  modified_base 20: mod_base = OTHER; note = 2'-O-methylguanosine-3'-phosphate
  modified_base 21: mod_base = OTHER; note = 2'-deoxy-2'-fluoroadenosine-3'-phosphate ((2S,4R)-1-[29-[[2-(acetylamino)-2-deoxy-beta-D-galactopyra nosyl]oxy]-14,14-bis[[3-[[3-[[5-[[2-(acetylamino)-2-deoxy-b eta-D-galactopyranosyl]oxy]-1-oxopentyl]amino]propyl]amino] -3-oxopropoxy]methyl]-1,12,19,25-tetraoxo-16-oxa-13,20,24-t riazanonacos-1-yl]-4-hydroxy-2-pyrrolidinyl)methyl ester
ttgacctcatggtgttcgtga

SEQ ID NO: 316 - RNA, 21 nt, synthetic construct
  source 1..21: mol_type = other RNA
  modified_base 1: mod_base = OTHER; note = 2'-deoxy-2'-fluorocytidine-3'-phosphorothioate
  modified_base 2: mod_base = OTHER; note = 2'-O-methylcytidine-3'-phosphorothioate
  modified_base 3: mod_base = OTHER; note = 2'-deoxy-2'-fluorocytidine-3'-phosphate
  modified_base 4: mod_base = OTHER; note = 2'-O-methylcytidine-3'-phosphate
  modified_base 5: mod_base = OTHER; note = 2'-deoxy-2'-fluorouridine-3'-phosphate
  modified_base 6: mod_base = OTHER; note = 2'-O-methyluridine-3'-phosphate
  modified_base 7: mod_base = OTHER; note = 2'-deoxy-2'-fluorocytidine-3'-phosphate
  modified_base 8: mod_base = OTHER; note = 2'-O-methylguanosine-3'-phosphate
  modified_base 9: mod_base = OTHER; note = 2'-deoxy-2'-fluoroadenosine-3'-phosphate
  modified_base 10: mod_base = OTHER; note = 2'-deoxy-2'-fluoroguanosine-3'-phosphate
  modified_base 11: mod_base = OTHER; note = 2'-deoxy-2'-fluoroguanosine-3'-phosphate
  modified_base 12: mod_base = OTHER; note = 2'-O-methyluridine-3'-phosphate
  modified_base 13: mod_base = OTHER; note = 2'-deoxy-2'-fluorocytidine-3'-phosphate
  modified_base 14: mod_base = OTHER; note = 2'-O-methyladenosine-3'-phosphate
  modified_base 15: mod_base = OTHER; note = 2'-deoxy-2'-fluorocytidine-3'-phosphate
  modified_base 16: mod_base = OTHER; note = 2'-O-methyladenosine-3'-phosphate
  modified_base 17: mod_base = OTHER; note = 2'-deoxy-2'-fluoroguanosine-3'-phosphate
  modified_base 18: mod_base = OTHER; note = 2'-O-methyluridine-3'-phosphate
  modified_base 19: mod_base = OTHER; note = 2'-deoxy-2'-fluoroadenosine-3'-phosphate
  modified_base 20: mod_base = OTHER; note = 2'-O-methyladenosine-3'-phosphate
  modified_base 21: mod_base = OTHER; note = 2'-deoxy-2'-fluorouridine-3'-phosphate ((2S,4R)-1-[29-[[2-(acetylamino)-2-deoxy-beta-D-galactopyra nosyl]oxy]-14,14-bis[[3-[[3-[[5-[[2-(acetylamino)-2-deoxy-b eta-D-galactopyranosyl]oxy]-1-oxopentyl]amino]propyl]amino] -3-oxopropoxy]methyl]-1,12,19,25-tetraoxo-16-oxa-13,20,24-t riazanonacos-1-yl]-4-hydroxy-2-pyrrolidinyl)methyl ester
ccccttcgaggtcacagtaat

SEQ ID NO: 317 - RNA, 21 nt, synthetic construct
  source 1..21: mol_type = other RNA
  modified_base 1: mod_base = OTHER; note = 2'-deoxy-2'-fluoroadenosine-3'-phosphorothioate
  modified_base 2: mod_base = OTHER; note = 2'-O-methyluridine-3'-phosphorothioate
  modified_base 3: mod_base = OTHER; note = 2'-deoxy-2'-fluoroguanosine-3'-phosphate
  modified_base 4: mod_base = OTHER; note = 2'-O-methyladenosine-3'-phosphate
  modified_base 5: mod_base = OTHER; note = 2'-deoxy-2'-fluoroadenosine-3'-phosphate
  modified_base 6: mod_base = OTHER; note = 2'-O-methylcytidine-3'-phosphate
  modified_base 7: mod_base = OTHER; note = 2'-deoxy-2'-fluoroadenosine-3'-phosphate
  modified_base 8: mod_base = OTHER; note = 2'-O-methyladenosine-3'-phosphate
  modified_base 9: mod_base = OTHER; note = 2'-deoxy-2'-fluoroadenosine-3'-phosphate
  modified_base 10: mod_base = OTHER; note = 2'-deoxy-2'-fluoroadenosine-3'-phosphate
  modified_base 11: mod_base = OTHER; note = 2'-deoxy-2'-fluorocytidine-3'-phosphate
  modified_base 12: mod_base = OTHER; note = 2'-O-methyluridine-3'-phosphate
  modified_base 13: mod_base = OTHER; note = 2'-deoxy-2'-fluoroguanosine-3'-phosphate
  modified_base 14: mod_base = OTHER; note = 2'-O-methyluridine-3'-phosphate
  modified_base 15: mod_base = OTHER; note = 2'-deoxy-2'-fluoroguanosine-3'-phosphate
  modified_base 16: mod_base = OTHER; note = 2'-O-methylguanosine-3'-phosphate
  modified_base 17: mod_base = OTHER; note = 2'-deoxy-2'-fluorocytidine-3'-phosphate
  modified_base 18: mod_base = OTHER; note = 2'-O-methyluridine-3'-phosphate
  modified_base 19: mod_base = OTHER; note = 2'-deoxy-2'-fluoroguanosine-3'-phosphate
  modified_base 20: mod_base = OTHER; note = 2'-O-methyluridine-3'-phosphate
  modified_base 21: mod_base = OTHER; note = 2'-deoxy-2'-fluorouridine-3'-phosphate ((2S,4R)-1-[29-[[2-(acetylamino)-2-deoxy-beta-D-galactopyra nosyl]oxy]-14,14-bis[[3-[[3-[[5-[[2-(acetylamino)-2-deoxy-b eta-D-galactopyranosyl]oxy]-1-oxopentyl]amino]propyl]amino] -3-oxopropoxy]methyl]-1,12,19,25-tetraoxo-16-oxa-13,20,24-t riazanonacos-1-yl]-4-hydroxy-2-pyrrolidinyl)methyl ester
atgaacaaaactgtggctgtt

SEQ ID NO: 318 - RNA, 21 nt, synthetic construct
  source 1..21: mol_type = other RNA
  modified_base 1: mod_base = OTHER; note = 2'-deoxy-2'-fluoroadenosine-3'-phosphorothioate
  modified_base 2: mod_base = OTHER; note = 2'-O-methylguanosine-3'-phosphorothioate
  modified_base 3: mod_base = OTHER; note = 2'-deoxy-2'-fluoroadenosine-3'-phosphate
  modified_base 4: mod_base = OTHER; note = 2'-O-methylcytidine-3'-phosphate
  modified_base 5: mod_base = OTHER; note = 2'-deoxy-2'-fluoroadenosine-3'-phosphate
  modified_base 6: mod_base = OTHER; note = 2'-O-methylguanosine-3'-phosphate
  modified_base 7: mod_base = OTHER; note = 2'-deoxy-2'-fluoroadenosine-3'-phosphate
  modified_base 8: mod_base = OTHER; note = 2'-O-methylcytidine-3'-phosphate
  modified_base 9: mod_base = OTHER; note = 2'-deoxy-2'-fluoroadenosine-3'-phosphate
  modified_base 10: mod_base = OTHER; note = 2'-deoxy-2'-fluoroadenosine-3'-phosphate
  modified_base 11: mod_base = OTHER; note = 2'-deoxy-2'-fluoroguanosine-3'-phosphate
  modified_base 12: mod_base = OTHER; note = 2'-O-methyladenosine-3'-phosphate
  modified_base 13: mod_base = OTHER; note = 2'-deoxy-2'-fluorocytidine-3'-phosphate
  modified_base 14: mod_base = OTHER; note = 2'-O-methylcytidine-3'-phosphate
  modified_base 15: mod_base = OTHER; note = 2'-deoxy-2'-fluoroadenosine-3'-phosphate
  modified_base 16: mod_base = OTHER; note = 2'-O-methyluridine-3'-phosphate
  modified_base 17: mod_base = OTHER; note = 2'-deoxy-2'-fluorocytidine-3'-phosphate
  modified_base 18: mod_base = OTHER; note = 2'-O-methyluridine-3'-phosphate
  modified_base 19: mod_base = OTHER; note = 2'-deoxy-2'-fluoroadenosine-3'-phosphate
  modified_base 20: mod_base = OTHER; note = 2'-O-methylcytidine-3'-phosphate
  modified_base 21: mod_base = OTHER; note = 2'-deoxy-2'-fluoroadenosine-3'-phosphate ((2S,4R)-1-[29-[[2-(acetylamino)-2-deoxy-beta-D-galactopyra nosyl]oxy]-14,14-bis[[3-[[3-[[5-[[2-(acetylamino)-2-deoxy-b eta-D-galactopyranosyl]oxy]-1-oxopentyl]amino]propyl]amino] -3-oxopropoxy]methyl]-1,12,19,25-tetraoxo-16-oxa-13,20,24-t riazanonacos-1-yl]-4-hydroxy-2-pyrrolidinyl)methyl ester
agacagacaagaccatctaca

SEQ ID NO: 319 - RNA, 21 nt, synthetic construct
  source 1..21: mol_type = other RNA
  modified_base 1: mod_base = OTHER; note = 2'-deoxy-2'-fluorocytidine-3'-phosphorothioate
  modified_base 2: mod_base = OTHER; note = 2'-O-methylcytidine-3'-phosphorothioate
  modified_base 3: mod_base = OTHER; note = 2'-deoxy-2'-fluoroadenosine-3'-phosphate
  modified_base 4: mod_base = OTHER; note = 2'-O-methylguanosine-3'-phosphate
  modified_base 5: mod_base = OTHER; note = 2'-deoxy-2'-fluoroadenosine-3'-phosphate
  modified_base 6: mod_base = OTHER; note = 2'-O-methyluridine-3'-phosphate
  modified_base 7: mod_base = OTHER; note = 2'-deoxy-2'-fluorocytidine-3'-phosphate
  modified_base 8: mod_base = OTHER; note = 2'-O-methylcytidine-3'-phosphate
  modified_base 9: mod_base = OTHER; note = 2'-deoxy-2'-fluoroadenosine-3'-phosphate
  modified_base 10: mod_base = OTHER; note = 2'-deoxy-2'-fluorocytidine-3'-phosphate
  modified_base 11: mod_base = OTHER; note = 2'-deoxy-2'-fluorouridine-3'-phosphate
  modified_base 12: mod_base = OTHER; note = 2'-O-methyluridine-3'-phosphate
  modified_base 13: mod_base = OTHER; note = 2'-deoxy-2'-fluorocytidine-3'-phosphate
  modified_base 14: mod_base = OTHER; note = 2'-O-methyladenosine-3'-phosphate
  modified_base 15: mod_base = OTHER; note = 2'-deoxy-2'-fluorocytidine-3'-phosphate
  modified_base 16: mod_base = OTHER; note = 2'-O-methylcytidine-3'-phosphate
  modified_base 17: mod_base = OTHER; note = 2'-deoxy-2'-fluoroadenosine-3'-phosphate
  modified_base 18: mod_base = OTHER; note = 2'-O-methyladenosine-3'-phosphate
  modified_base 19: mod_base = OTHER; note = 2'-deoxy-2'-fluoroguanosine-3'-phosphate
  modified_base 20: mod_base = OTHER; note = 2'-O-methyladenosine-3'-phosphate
  modified_base 21: mod_base = OTHER; note = 2'-deoxy-2'-fluorocytidine-3'-phosphate ((2S,4R)-1-[29-[[2-(acetylamino)-2-deoxy-beta-D-galactopyra nosyl]oxy]-14,14-bis[[3-[[3-[[5-[[2-(acetylamino)-2-deoxy-b eta-D-galactopyranosyl]oxy]-1-oxopentyl]amino]propyl]amino] -3-oxopropoxy]methyl]-1,12,19,25-tetraoxo-16-oxa-13,20,24-t riazanonacos-1-yl]-4-hydroxy-2-pyrrolidinyl)methyl ester
ccagatccacttcaccaagac

SEQ ID NO: 320 - RNA, 21 nt, synthetic construct
  source 1..21: mol_type = other RNA
  modified_base 1: mod_base = OTHER; note = 2'-deoxy-2'-fluoroadenosine-3'-phosphorothioate
  modified_base 2: mod_base = OTHER; note = 2'-O-methylguanosine-3'-phosphorothioate
  modified_base 3: mod_base = OTHER; note = 2'-deoxy-2'-fluoroguanosine-3'-phosphate
  modified_base 4: mod_base = OTHER; note = 2'-O-methylguanosine-3'-phosphate
  modified_base 5: mod_base = OTHER; note = 2'-deoxy-2'-fluoroadenosine-3'-phosphate
  modified_base 6: mod_base = OTHER; note = 2'-O-methyluridine-3'-phosphate
  modified_base 7: mod_base = OTHER; note = 2'-deoxy-2'-fluorocytidine-3'-phosphate
  modified_base 8: mod_base = OTHER; note = 2'-O-methyluridine-3'-phosphate
  modified_base 9: mod_base = OTHER; note = 2'-deoxy-2'-fluoroguanosine-3'-phosphate
  modified_base 10: mod_base = OTHER; note = 2'-deoxy-2'-fluorouridine-3'-phosphate
  modified_base 11: mod_base = OTHER; note = 2'-deoxy-2'-fluoroguanosine-3'-phosphate
  modified_base 12: mod_base = OTHER; note = 2'-O-methyluridine-3'-phosphate
  modified_base 13: mod_base = OTHER; note = 2'-deoxy-2'-fluoroguanosine-3'-phosphate
  modified_base 14: mod_base = OTHER; note = 2'-O-methylguanosine-3'-phosphate
  modified_base 15: mod_base = OTHER; note = 2'-deoxy-2'-fluorocytidine-3'-phosphate
  modified_base 16: mod_base = OTHER; note = 2'-O-methyladenosine-3'-phosphate
  modified_base 17: mod_base = OTHER; note = 2'-deoxy-2'-fluoroguanosine-3'-phosphate
  modified_base 18: mod_base = OTHER; note = 2'-O-methyladenosine-3'-phosphate
  modified_base 19: mod_base = OTHER; note = 2'-deoxy-2'-fluorocytidine-3'-phosphate
  modified_base 20: mod_base = OTHER; note = 2'-O-methylcytidine-3'-phosphate
  modified_base 21: mod_base = OTHER; note = 2'-deoxy-2'-fluoroadenosine-3'-phosphate ((2S,4R)-1-[29-[[2-(acetylamino)-2-deoxy-beta-D-galactopyra nosyl]oxy]-14,14-bis[[3-[[3-[[5-[[2-(acetylamino)-2-deoxy-b eta-D-galactopyranosyl]oxy]-1-oxopentyl]amino]propyl]amino] -3-oxopropoxy]methyl]-1,12,19,25-tetraoxo-16-oxa-13,20,24-t riazanonacos-1-yl]-4-hydroxy-2-pyrrolidinyl)methyl ester
agggatctgtgtggcagacca

SEQ ID NO: 321 - RNA, 21 nt, synthetic construct
  source 1..21: mol_type = other RNA
  modified_base 1: mod_base = OTHER; note = 2'-deoxy-2'-fluoroguanosine-3'-phosphorothioate
  modified_base 2: mod_base = OTHER; note = 2'-O-methyladenosine-3'-phosphorothioate
  modified_base 3: mod_base = OTHER; note = 2'-deoxy-2'-fluorocytidine-3'-phosphate
  modified_base 4: mod_base = OTHER; note = 2'-O-methyladenosine-3'-phosphate
  modified_base 5: mod_base = OTHER; note = 2'-deoxy-2'-fluoroadenosine-3'-phosphate
  modified_base 6: mod_base = OTHER; note = 2'-O-methylguanosine-3'-phosphate
  modified_base 7: mod_base = OTHER; note = 2'-deoxy-2'-fluoroadenosine-3'-phosphate
  modified_base 8: mod_base = OTHER; note = 2'-O-methylcytidine-3'-phosphate
  modified_base 9: mod_base = OTHER; note = 2'-deoxy-2'-fluorocytidine-3'-phosphate
  modified_base 10: mod_base = OTHER; note = 2'-deoxy-2'-fluoroadenosine-3'-phosphate
  modified_base 11: mod_base = OTHER; note = 2'-deoxy-2'-fluorouridine-3'-phosphate
  modified_base 12: mod_base = OTHER; note = 2'-O-methylcytidine-3'-phosphate
  modified_base 13: mod_base = OTHER; note = 2'-deoxy-2'-fluorouridine-3'-phosphate
  modified_base 14: mod_base = OTHER; note = 2'-O-methyladenosine-3'-phosphate
  modified_base 15: mod_base = OTHER; note = 2'-deoxy-2'-fluorocytidine-3'-phosphate
  modified_base 16: mod_base = OTHER; note = 2'-O-methyladenosine-3'-phosphate
  modified_base 17: mod_base = OTHER; note = 2'-deoxy-2'-fluorocytidine-3'-phosphate
  modified_base 18: mod_base = OTHER; note = 2'-O-methylcytidine-3'-phosphate
  modified_base 19: mod_base = OTHER; note = 2'-deoxy-2'-fluorocytidine-3'-phosphate
  modified_base 20: mod_base = OTHER; note = 2'-O-methylcytidine-3'-phosphate
  modified_base 21: mod_base = OTHER; note = 2'-deoxy-2'-fluorouridine-3'-phosphate ((2S,4R)-1-[29-[[2-(acetylamino)-2-deoxy-beta-D-galactopyra nosyl]oxy]-14,14-bis[[3-[[3-[[5-[[2-(acetylamino)-2-deoxy-b eta-D-galactopyranosyl]oxy]-1-oxopentyl]amino]propyl]amino] -3-oxopropoxy]methyl]-1,12,19,25-tetraoxo-16-oxa-13,20,24-t riazanonacos-1-yl]-4-hydroxy-2-pyrrolidinyl)methyl ester
gacaagaccatctacacccct

SEQ ID NO: 322 - RNA, 21 nt, synthetic construct
  source 1..21: mol_type = other RNA
  modified_base 1: mod_base = OTHER; note = 2'-deoxy-2'-fluoroguanosine-3'-phosphorothioate
  modified_base 2: mod_base = OTHER; note = 2'-O-methylcytidine-3'-phosphorothioate
  modified_base 3: mod_base = OTHER; note = 2'-deoxy-2'-fluorouridine-3'-phosphate
  modified_base 4: mod_base = OTHER; note = 2'-O-methylguanosine-3'-phosphate
  modified_base 5: mod_base = OTHER; note = 2'-deoxy-2'-fluoroadenosine-3'-phosphate
  modified_base 6: mod_base = OTHER; note = 2'-O-methylguanosine-3'-phosphate
  modified_base 7: mod_base = OTHER; note = 2'-deoxy-2'-fluoroguanosine-3'-phosphate
  modified_base 8: mod_base = OTHER; note = 2'-O-methyladenosine-3'-phosphate
  modified_base 9: mod_base = OTHER; note = 2'-deoxy-2'-fluoroguanosine-3'-phosphate
  modified_base 10: mod_base = OTHER; note = 2'-deoxy-2'-fluoroadenosine-3'-phosphate
  modified_base 11: mod_base = OTHER; note = 2'-deoxy-2'-fluoroadenosine-3'-phosphate
  modified_base 12: mod_base = OTHER; note = 2'-O-methyluridine-3'-phosphate
  modified_base 13: mod_base = OTHER; note = 2'-deoxy-2'-fluorouridine-3'-phosphate
  modified_base 14: mod_base = OTHER; note = 2'-O-methylguanosine-3'-phosphate
  modified_base 15: mod_base = OTHER; note = 2'-deoxy-2'-fluorocytidine-3'-phosphate
  modified_base 16: mod_base = OTHER; note = 2'-O-methyluridine-3'-phosphate
  modified_base 17: mod_base = OTHER; note = 2'-deoxy-2'-fluorouridine-3'-phosphate
  modified_base 18: mod_base = OTHER; note = 2'-O-methylcytidine-3'-phosphate
  modified_base 19: mod_base = OTHER; note = 2'-deoxy-2'-fluoroadenosine-3'-phosphate
  modified_base 20: mod_base = OTHER; note = 2'-O-methyluridine-3'-phosphate
  modified_base 21: mod_base = OTHER; note = 2'-deoxy-2'-fluoroadenosine-3'-phosphate ((2S,4R)-1-[29-[[2-(acetylamino)-2-deoxy-beta-D-galactopyra nosyl]oxy]-14,14-bis[[3-[[3-[[5-[[2-(acetylamino)-2-deoxy-b eta-D-galactopyranosyl]oxy]-1-oxopentyl]amino]propyl]amino] -3-oxopropoxy]methyl]-1,12,19,25-tetraoxo-16-oxa-13,20,24-t riazanonacos-1-yl]-4-hydroxy-2-pyrrolidinyl)methyl ester
gctgaggagaattgcttcata

SEQ ID NO: 323 - RNA, 21 nt, synthetic construct
  source 1..21: mol_type = other RNA
  modified_base 1: mod_base = OTHER; note = 2'-deoxy-2'-fluoroadenosine-3'-phosphorothioate
  modified_base 2: mod_base = OTHER; note = 2'-O-methylcytidine-3'-phosphorothioate
  modified_base 3: mod_base = OTHER; note = 2'-deoxy-2'-fluoroguanosine-3'-phosphate
  modified_base 4: mod_base = OTHER; note = 2'-O-methyluridine-3'-phosphate
  modified_base 5: mod_base = OTHER; note = 2'-deoxy-2'-fluoroguanosine-3'-phosphate
  modified_base 6: mod_base = OTHER; note = 2'-O-methylguanosine-3'-phosphate
  modified_base 7: mod_base = OTHER; note = 2'-deoxy-2'-fluorouridine-3'-phosphate
  modified_base 8: mod_base = OTHER; note = 2'-O-methylcytidine-3'-phosphate
  modified_base 9: mod_base = OTHER; note = 2'-deoxy-2'-fluoroadenosine-3'-phosphate
  modified_base 10: mod_base = OTHER; note = 2'-deoxy-2'-fluoroadenosine-3'-phosphate
  modified_base 11: mod_base = OTHER; note = 2'-deoxy-2'-fluoroguanosine-3'-phosphate
  modified_base 12: mod_base = OTHER; note = 2'-O-methylguanosine-3'-phosphate
  modified_base 13: mod_base = OTHER; note = 2'-deoxy-2'-fluorouridine-3'-phosphate
  modified_base 14: mod_base = OTHER; note = 2'-O-methylcytidine-3'-phosphate
  modified_base 15: mod_base = OTHER; note = 2'-deoxy-2'-fluorouridine-3'-phosphate
  modified_base 16: mod_base = OTHER; note = 2'-O-methyluridine-3'-phosphate
  modified_base 17: mod_base = OTHER; note = 2'-deoxy-2'-fluorocytidine-3'-phosphate
  modified_base 18: mod_base = OTHER; note = 2'-O-methyluridine-3'-phosphate
  modified_base 19: mod_base = OTHER; note = 2'-deoxy-2'-fluorocytidine-3'-phosphate
  modified_base 20: mod_base = OTHER; note = 2'-O-methyluridine-3'-phosphate
  modified_base 21: mod_base = OTHER; note = 2'-deoxy-2'-fluorocytidine-3'-phosphate ((2S,4R)-1-[29-[[2-(acetylamino)-2-deoxy-beta-D-galactopyra nosyl]oxy]-14,14-bis[[3-[[3-[[5-[[2-(acetylamino)-2-deoxy-b eta-D-galactopyranosyl]oxy]-1-oxopentyl]amino]propyl]amino] -3-oxopropoxy]methyl]-1,12,19,25-tetraoxo-16-oxa-13,20,24-t riazanonacos-1-yl]-4-hydroxy-2-pyrrolidinyl)methyl ester
acgtggtcaaggtcttctctc

SEQ ID NO: 324 - RNA, 21 nt, synthetic construct
  source 1..21: mol_type = other RNA
  modified_base 1: mod_base = OTHER; note = 2'-deoxy-2'-fluoroguanosine-3'-phosphorothioate
  modified_base 2: mod_base = OTHER; note = 2'-O-methylguanosine-3'-phosphorothioate
  modified_base 3: mod_base = OTHER; note = 2'-deoxy-2'-fluoroadenosine-3'-phosphate
  modified_base 4: mod_base = OTHER; note = 2'-O-methyluridine-3'-phosphate
  modified_base 5: mod_base = OTHER; note = 2'-deoxy-2'-fluorocytidine-3'-phosphate
  modified_base 6: mod_base = OTHER; note = 2'-O-methyluridine-3'-phosphate
  modified_base 7: mod_base = OTHER; note = 2'-deoxy-2'-fluoroguanosine-3'-phosphate
  modified_base 8: mod_base = OTHER; note = 2'-O-methyluridine-3'-phosphate
  modified_base 9: mod_base = OTHER; note = 2'-deoxy-2'-fluoroguanosine-3'-phosphate
  modified_base 10: mod_base = OTHER; note = 2'-deoxy-2'-fluorouridine-3'-phosphate
  modified_base 11: mod_base = OTHER; note = 2'-deoxy-2'-fluoroguanosine-3'-phosphate
  modified_base 12: mod_base = OTHER; note = 2'-O-methylguanosine-3'-phosphate
  modified_base 13: mod_base = OTHER; note = 2'-deoxy-2'-fluorocytidine-3'-phosphate
  modified_base 14: mod_base = OTHER; note = 2'-O-methyladenosine-3'-phosphate
  modified_base 15: mod_base = OTHER; note = 2'-deoxy-2'-fluoroguanosine-3'-phosphate
  modified_base 16: mod_base = OTHER; note = 2'-O-methyladenosine-3'-phosphate
  modified_base 17: mod_base = OTHER; note = 2'-deoxy-2'-fluorocytidine-3'-phosphate
  modified_base 18: mod_base = OTHER; note = 2'-O-methylcytidine-3'-phosphate
  modified_base 19: mod_base = OTHER; note = 2'-deoxy-2'-fluorocytidine-3'-phosphate
  modified_base 20: mod_base = OTHER; note = 2'-O-methylcytidine-3'-phosphate
  modified_base 21: mod_base = OTHER; note = 2'-deoxy-2'-fluorouridine-3'-phosphate ((2S,4R)-1-[29-[[2-(acetylamino)-2-deoxy-beta-D-galactopyra nosyl]oxy]-14,14-bis[[3-[[3-[[5-[[2-(acetylamino)-2-deoxy-b eta-D-galactopyranosyl]oxy]-1-oxopentyl]amino]propyl]amino] -3-oxopropoxy]methyl]-1,12,19,25-tetraoxo-16-oxa-13,20,24-t riazanonacos-1-yl]-4-hydroxy-2-pyrrolidinyl)methyl ester
ggatctgtgtggcagacccct

SEQ ID NO: 325 - RNA, 21 nt, synthetic construct
  source 1..21: mol_type = other RNA
  modified_base 1: mod_base = OTHER; note = 2'-deoxy-2'-fluoroadenosine-3'-phosphorothioate
  modified_base 2: mod_base = OTHER; note = 2'-O-methylcytidine-3'-phosphorothioate
  modified_base 3: mod_base = OTHER; note = 2'-deoxy-2'-fluoroadenosine-3'-phosphate
  modified_base 4: mod_base = OTHER; note = 2'-O-methylguanosine-3'-phosphate
  modified_base 5: mod_base = OTHER; note = 2'-deoxy-2'-fluoroadenosine-3'-phosphate
  modified_base 6: mod_base = OTHER; note = 2'-O-methylcytidine-3'-phosphate
  modified_base 7: mod_base = OTHER; note = 2'-deoxy-2'-fluoroadenosine-3'-phosphate
  modified_base 8: mod_base = OTHER; note = 2'-O-methyladenosine-3'-phosphate
  modified_base 9: mod_base = OTHER; note = 2'-deoxy-2'-fluoroguanosine-3'-phosphate
  modified_base 10: mod_base = OTHER; note = 2'-deoxy-2'-fluoroadenosine-3'-phosphate
  modified_base 11: mod_base = OTHER; note = 2'-deoxy-2'-fluorocytidine-3'-phosphate
  modified_base 12: mod_base = OTHER; note = 2'-O-methylcytidine-3'-phosphate
  modified_base 13: mod_base = OTHER; note = 2'-deoxy-2'-fluoroadenosine-3'-phosphate
  modified_base 14: mod_base = OTHER; note = 2'-O-methyluridine-3'-phosphate
  modified_base 15: mod_base = OTHER; note = 2'-deoxy-2'-fluorocytidine-3'-phosphate
  modified_base 16: mod_base = OTHER; note = 2'-O-methyluridine-3'-phosphate
  modified_base 17: mod_base = OTHER; note = 2'-deoxy-2'-fluoroadenosine-3'-phosphate
  modified_base 18: mod_base = OTHER; note = 2'-O-methylcytidine-3'-phosphate
  modified_base 19: mod_base = OTHER; note = 2'-deoxy-2'-fluoroadenosine-3'-phosphate
  modified_base 20: mod_base = OTHER; note = 2'-O-methylcytidine-3'-phosphate
  modified_base 21: mod_base = OTHER; note = 2'-deoxy-2'-fluoroadenosine-3'-phosphate ((2S,4R)-1-[29-[[2-(acetylamino)-2-deoxy-beta-D-galactopyra nosyl]oxy]-14,14-bis[[3-[[3-[[5-[[2-(acetylamino)-2-deoxy-b eta-D-galactopyranosyl]oxy]-1-oxopentyl]amino]propyl]amino] -3-oxopropoxy]methyl]-1,12,19,25-tetraoxo-16-oxa-13,20,24-t riazanonacos-1-yl]-4-hydroxy-2-pyrrolidinyl)methyl ester
acagacaagaccatctacaca

SEQ ID NO: 326 - RNA, 21 nt, synthetic construct
  source 1..21: mol_type = other RNA
  modified_base 1: mod_base = OTHER; note = 2'-deoxy-2'-fluoroadenosine-3'-phosphorothioate
  modified_base 2: mod_base = OTHER; note = 2'-O-methyluridine-3'-phosphorothioate
  modified_base 3: mod_base = OTHER; note = 2'-deoxy-2'-fluorocytidine-3'-phosphate
  modified_base 4: mod_base = OTHER; note = 2'-O-methylcytidine-3'-phosphate
  modified_base 5: mod_base = OTHER; note = 2'-deoxy-2'-fluoroadenosine-3'-phosphate
  modified_base 6: mod_base = OTHER; note = 2'-O-methylguanosine-3'-phosphate
  modified_base 7: mod_base = OTHER; note = 2'-deoxy-2'-fluoroadenosine-3'-phosphate
  modified_base 8: mod_base = OTHER; note = 2'-O-methylcytidine-3'-phosphate
  modified_base 9: mod_base = OTHER; note = 2'-deoxy-2'-fluoroadenosine-3'-phosphate
  modified_base 10: mod_base = OTHER; note = 2'-deoxy-2'-fluoroguanosine-3'-phosphate
  modified_base 11: mod_base = OTHER; note = 2'-deoxy-2'-fluoroadenosine-3'-phosphate
  modified_base 12: mod_base = OTHER; note = 2'-O-methylcytidine-3'-phosphate
  modified_base 13: mod_base = OTHER; note = 2'-deoxy-2'-fluoroadenosine-3'-phosphate
  modified_base 14: mod_base = OTHER; note = 2'-O-methyladenosine-3'-phosphate
  modified_base 15: mod_base = OTHER; note = 2'-deoxy-2'-fluoroguanosine-3'-phosphate
  modified_base 16: mod_base = OTHER; note = 2'-O-methyladenosine-3'-phosphate
  modified_base 17: mod_base = OTHER; note = 2'-deoxy-2'-fluorocytidine-3'-phosphate
  modified_base 18: mod_base = OTHER; note = 2'-O-methylcytidine-3'-phosphate
  modified_base 19: mod_base = OTHER; note = 2'-deoxy-2'-fluoroadenosine-3'-phosphate
  modified_base 20: mod_base = OTHER; note = 2'-O-methyluridine-3'-phosphate
  modified_base 21: mod_base = OTHER; note = 2'-deoxy-2'-fluorouridine-3'-phosphate ((2S,4R)-1-[29-[[2-(acetylamino)-2-deoxy-beta-D-galactopyra nosyl]oxy]-14,14-bis[[3-[[3-[[5-[[2-(acetylamino)-2-deoxy-b eta-D-galactopyranosyl]oxy]-1-oxopentyl]amino]propyl]amino] -3-oxopropoxy]methyl]-1,12,19,25-tetraoxo-16-oxa-13,20,24-t riazanonacos-1-yl]-4-hydroxy-2-pyrrolidinyl)methyl ester
atccagacagacaagaccatt

SEQ ID NO: 327 - RNA, 21 nt, synthetic construct
  source 1..21: mol_type = other RNA
  modified_base 1: mod_base = OTHER; note = 2'-deoxy-2'-fluorocytidine-3'-phosphorothioate
  modified_base 2: mod_base = OTHER; note = 2'-O-methyluridine-3'-phosphorothioate
  modified_base 3: mod_base = OTHER; note = 2'-deoxy-2'-fluorocytidine-3'-phosphate
  modified_base 4: mod_base = OTHER; note = 2'-O-methylcytidine-3'-phosphate
  modified_base 5: mod_base = OTHER; note = 2'-deoxy-2'-fluoroguanosine-3'-phosphate
  modified_base 6: mod_base = OTHER; note = 2'-O-methyluridine-3'-phosphate
  modified_base 7: mod_base = OTHER; note = 2'-deoxy-2'-fluoroguanosine-3'-phosphate
  modified_base 8: mod_base = OTHER; note = 2'-O-methyluridine-3'-phosphate
  modified_base 9: mod_base = OTHER; note = 2'-deoxy-2'-fluoroguanosine-3'-phosphate
  modified_base 10: mod_base = OTHER; note = 2'-deoxy-2'-fluoroguanosine-3'-phosphate
  modified_base 11: mod_base = OTHER; note = 2'-deoxy-2'-fluoroguanosine-3'-phosphate
  modified_base 12: mod_base = OTHER; note = 2'-O-methyluridine-3'-phosphate
  modified_base 13: mod_base = OTHER; note = 2'-deoxy-2'-fluoroguanosine-3'-phosphate
  modified_base 14: mod_base = OTHER; note = 2'-O-methylguanosine-3'-phosphate
  modified_base 15: mod_base = OTHER; note = 2'-deoxy-2'-fluoroadenosine-3'-phosphate
  modified_base 16: mod_base = OTHER; note = 2'-O-methylcytidine-3'-phosphate
  modified_base 17: mod_base = OTHER; note = 2'-deoxy-2'-fluoroguanosine-3'-phosphate
  modified_base 18: mod_base = OTHER; note = 2'-O-methyluridine-3'-phosphate
  modified_base 19: mod_base = OTHER; note = 2'-deoxy-2'-fluorocytidine-3'-phosphate
  modified_base 20: mod_base = OTHER; note = 2'-O-methyladenosine-3'-phosphate
  modified_base 21: mod_base = OTHER; note = 2'-deoxy-2'-fluoroadenosine-3'-phosphate ((2S,4R)-1-[29-[[2-(acetylamino)-2-deoxy-beta-D-galactopyra nosyl]oxy]-14,14-bis[[3-[[3-[[5-[[2-(acetylamino)-2-deoxy-b eta-D-galactopyranosyl]oxy]-1-oxopentyl]amino]propyl]amino] -3-oxopropoxy]methyl]-1,12,19,25-tetraoxo-16-oxa-13,20,24-t riazanonacos-1-yl]-4-hydroxy-2-pyrrolidinyl)methyl ester
ctccgtgtgggtggacgtcaa

SEQ ID NO: 328 - RNA, 21 nt, synthetic construct
  source 1..21: mol_type = other RNA
  modified_base 1: mod_base = OTHER; note = 2'-deoxy-2'-fluorouridine-3'-phosphorothioate
  modified_base 2: mod_base = OTHER; note = 2'-O-methylcytidine-3'-phosphorothioate
  modified_base 3: mod_base = OTHER; note = 2'-deoxy-2'-fluorocytidine-3'-phosphate
  modified_base 4: mod_base = OTHER; note = 2'-O-methyladenosine-3'-phosphate
  modified_base 5: mod_base = OTHER; note = 2'-deoxy-2'-fluoroguanosine-3'-phosphate
  modified_base 6: mod_base = OTHER; note = 2'-O-methyladenosine-3'-phosphate
  modified_base 7: mod_base = OTHER; note = 2'-deoxy-2'-fluorocytidine-3'-phosphate
  modified_base 8: mod_base = OTHER; note = 2'-O-methyladenosine-3'-phosphate
  modified_base 9: mod_base = OTHER; note = 2'-deoxy-2'-fluoroguanosine-3'-phosphate
  modified_base 10: mod_base = OTHER; note = 2'-deoxy-2'-fluoroadenosine-3'-phosphate
  modified_base 11: mod_base = OTHER; note = 2'-deoxy-2'-fluorocytidine-3'-phosphate
  modified_base 12: mod_base = OTHER; note = 2'-O-methyladenosine-3'-phosphate
  modified_base 13: mod_base = OTHER; note = 2'-deoxy-2'-fluoroadenosine-3'-phosphate
  modified_base 14: mod_base = OTHER; note = 2'-O-methylguanosine-3'-phosphate
  modified_base 15: mod_base = OTHER; note = 2'-deoxy-2'-fluoroadenosine-3'-phosphate
  modified_base 16: mod_base = OTHER; note = 2'-O-methylcytidine-3'-phosphate
  modified_base 17: mod_base = OTHER; note = 2'-deoxy-2'-fluorocytidine-3'-phosphate
  modified_base 18: mod_base = OTHER; note = 2'-O-methyladenosine-3'-phosphate
  modified_base 19: mod_base = OTHER; note = 2'-deoxy-2'-fluorouridine-3'-phosphate
  modified_base 20: mod_base = OTHER; note = 2'-O-methylcytidine-3'-phosphate
  modified_base 21: mod_base = OTHER; note = 2'-deoxy-2'-fluorouridine-3'-phosphate ((2S,4R)-1-[29-[[2-(acetylamino)-2-deoxy-beta-D-galactopyra nosyl]oxy]-14,14-bis[[3-[[3-[[5-[[2-(acetylamino)-2-deoxy-b eta-D-galactopyranosyl]oxy]-1-oxopentyl]amino]propyl]amino] -3-oxopropoxy]methyl]-1,12,19,25-tetraoxo-16-oxa-13,20,24-t riazanonacos-1-yl]-4-hydroxy-2-pyrrolidinyl)methyl ester
tccagacagacaagaccatct

SEQ ID NO: 329 - RNA, 21 nt, synthetic construct
  source 1..21: mol_type = other RNA
  modified_base 1: mod_base = OTHER; note = 2'-deoxy-2'-fluoroadenosine-3'-phosphorothioate
  modified_base 2: mod_base = OTHER; note = 2'-O-methylguanosine-3'-phosphorothioate
  modified_base 3: mod_base = OTHER; note = 2'-deoxy-2'-fluoroguanosine-3'-phosphate
  modified_base 4: mod_base = OTHER; note = 2'-O-methylguanosine-3'-phosphate
  modified_base 5: mod_base = OTHER; note = 2'-deoxy-2'-fluoroadenosine-3'-phosphate
  modified_base 6: mod_base = OTHER; note = 2'-O-methyluridine-3'-phosphate
  modified_base 7: mod_base = OTHER; note = 2'-deoxy-2'-fluorocytidine-3'-phosphate
  modified_base 8: mod_base = OTHER; note = 2'-O-methyluridine-3'-phosphate
  modified_base 9: mod_base = OTHER; note = 2'-deoxy-2'-fluoroguanosine-3'-phosphate
  modified_base 10: mod_base = OTHER; note = 2'-deoxy-2'-fluorouridine-3'-phosphate
  modified_base 11: mod_base = OTHER; note = 2'-deoxy-2'-fluoroguanosine-3'-phosphate
  modified_base 12: mod_base = OTHER; note = 2'-O-methyluridine-3'-phosphate
  modified_base 13: mod_base = OTHER; note = 2'-deoxy-2'-fluoroguanosine-3'-phosphate
  modified_base 14: mod_base = OTHER; note = 2'-O-methylguanosine-3'-phosphate
  modified_base 15: mod_base = OTHER; note = 2'-deoxy-2'-fluorocytidine-3'-phosphate
  modified_base 16: mod_base = OTHER; note = 2'-O-methyladenosine-3'-phosphate
  modified_base 17: mod_base = OTHER; note = 2'-deoxy-2'-fluoroguanosine-3'-phosphate
  modified_base 18: mod_base = OTHER; note = 2'-O-methyladenosine-3'-phosphate
  modified_base 19: mod_base = OTHER; note = 2'-deoxy-2'-fluorocytidine-3'-phosphate
  modified_base 20: mod_base = OTHER; note = 2'-O-methylcytidine-3'-phosphate
  modified_base 21: mod_base = OTHER; note = 2'-deoxy-2'-fluorocytidine-3'-phosphate ((2S,4R)-1-[29-[[2-(acetylamino)-2-deoxy-beta-D-galactopyra nosyl]oxy]-14,14-bis[[3-[[3-[[5-[[2-(acetylamino)-2-deoxy-b eta-D-galactopyranosyl]oxy]-1-oxopentyl]amino]propyl]amino] -3-oxopropoxy]methyl]-1,12,19,25-tetraoxo-16-oxa-13,20,24-t riazanonacos-1-yl]-4-hydroxy-2-pyrrolidinyl)methyl ester
agggatctgtgtggcagaccc

SEQ ID NO: 330 - RNA, 21 nt, synthetic construct
  source 1..21: mol_type = other RNA
  modified_base 1: mod_base = OTHER; note = 2'-deoxy-2'-fluorocytidine-3'-phosphorothioate
  modified_base 2: mod_base = OTHER; note = 2'-O-methyladenosine-3'-phosphorothioate
  modified_base 3: mod_base = OTHER; note = 2'-deoxy-2'-fluoroadenosine-3'-phosphate
  modified_base 4: mod_base = OTHER; note = 2'-O-methylguanosine-3'-phosphate
  modified_base 5: mod_base = OTHER; note = 2'-deoxy-2'-fluoroadenosine-3'-phosphate
  modified_base 6: mod_base = OTHER; note = 2'-O-methyladenosine-3'-phosphate
  modified_base 7: mod_base = OTHER; note = 2'-deoxy-2'-fluoroadenosine-3'-phosphate
  modified_base 8: mod_base = OTHER; note = 2'-O-methylguanosine-3'-phosphate
  modified_base 9: mod_base = OTHER; note = 2'-deoxy-2'-fluoroguanosine-3'-phosphate
  modified_base 10: mod_base = OTHER; note = 2'-deoxy-2'-fluoroguanosine-3'-phosphate
  modified_base 11: mod_base = OTHER; note = 2'-deoxy-2'-fluoroadenosine-3'-phosphate
  modified_base 12: mod_base = OTHER; note = 2'-O-methyluridine-3'-phosphate
  modified_base 13: mod_base = OTHER; note = 2'-deoxy-2'-fluorocytidine-3'-phosphate
  modified_base 14: mod_base = OTHER; note = 2'-O-methyluridine-3'-phosphate
  modified_base 15: mod_base = OTHER; note = 2'-deoxy-2'-fluoroguanosine-3'-phosphate
  modified_base 16: mod_base = OTHER; note = 2'-O-methyluridine-3'-phosphate
  modified_base 17: mod_base = OTHER; note = 2'-deoxy-2'-fluoroguanosine-3'-phosphate
  modified_base 18: mod_base = OTHER; note = 2'-O-methyluridine-3'-phosphate
  modified_base 19: mod_base = OTHER; note = 2'-deoxy-2'-fluoroguanosine-3'-phosphate
  modified_base 20: mod_base = OTHER; note = 2'-O-methylguanosine-3'-phosphate
  modified_base 21: mod_base = OTHER; note = 2'-deoxy-2'-fluoroadenosine-3'-phosphate ((2S,4R)-1-[29-[[2-(acetylamino)-2-deoxy-beta-D-galactopyra nosyl]oxy]-14,14-bis[[3-[[3-[[5-[[2-(acetylamino)-2-deoxy-b eta-D-galactopyranosyl]oxy]-1-oxopentyl]amino]propyl]amino] -3-oxopropoxy]methyl]-1,12,19,25-tetraoxo-16-oxa-13,20,24-t riazanonacos-1-yl]-4-hydroxy-2-pyrrolidinyl)methyl ester
caagaaagggatctgtgtgga

SEQ ID NO: 331 - RNA, 21 nt, synthetic construct
  source 1..21: mol_type = other RNA
  modified_base 1: mod_base = OTHER; note = 2'-deoxy-2'-fluorouridine-3'-phosphorothioate
  modified_base 2: mod_base = OTHER; note = 2'-O-methylguanosine-3'-phosphorothioate
  modified_base 3: mod_base = OTHER; note = 2'-deoxy-2'-fluoroadenosine-3'-phosphate
  modified_base 4: mod_base = OTHER; note = 2'-O-methylcytidine-3'-phosphate
  modified_base 5: mod_base = OTHER; note = 2'-deoxy-2'-fluorocytidine-3'-phosphate
  modified_base 6: mod_base = OTHER; note = 2'-O-methyluridine-3'-phosphate
  modified_base 7: mod_base = OTHER; note = 2'-deoxy-2'-fluorocytidine-3'-phosphate
  modified_base 8: mod_base = OTHER; note = 2'-O-methyladenosine-3'-phosphate
  modified_base 9: mod_base = OTHER; note = 2'-deoxy-2'-fluorouridine-3'-phosphate
  modified_base 10: mod_base = OTHER; note = 2'-deoxy-2'-fluoroguanosine-3'-phosphate
  modified_base 11: mod_base = OTHER; note = 2'-deoxy-2'-fluoroguanosine-3'-phosphate
  modified_base 12: mod_base = OTHER; note = 2'-O-methyluridine-3'-phosphate
  modified_base 13: mod_base = OTHER; note = 2'-deoxy-2'-fluoroguanosine-3'-phosphate
  modified_base 14: mod_base = OTHER; note = 2'-O-methyluridine-3'-phosphate
  modified_base 15: mod_base = OTHER; note = 2'-deoxy-2'-fluorouridine-3'-phosphate
  modified_base 16: mod_base = OTHER; note = 2'-O-methylcytidine-3'-phosphate
  modified_base 17: mod_base = OTHER; note = 2'-deoxy-2'-fluoroguanosine-3'-phosphate
  modified_base 18: mod_base = OTHER; note = 2'-O-methyluridine-3'-phosphate
  modified_base 19: mod_base = OTHER; note = 2'-deoxy-2'-fluoroguanosine-3'-phosphate
  modified_base 20: mod_base = OTHER; note = 2'-O-methyladenosine-3'-phosphate
  modified_base 21: mod_base = OTHER; note = 2'-deoxy-2'-fluorouridine-3'-phosphate ((2S,4R)-1-[29-[[2-(acetylamino)-2-deoxy-beta-D-galactopyra nosyl]oxy]-14,14-bis[[3-[[3-[[5-[[2-(acetylamino)-2-deoxy-b eta-D-galactopyranosyl]oxy]-1-oxopentyl]amino]propyl]amino] -3-oxopropoxy]methyl]-1,12,19,25-tetraoxo-16-oxa-13,20,24-t riazanonacos-1-yl]-4-hydroxy-2-pyrrolidinyl)methyl ester
tgacctcatggtgttcgtgat

SEQ ID NO: 332 - RNA, 21 nt, synthetic construct
  source 1..21: mol_type = other RNA
  modified_base 1: mod_base = OTHER; note = 2'-deoxy-2'-fluoroguanosine-3'-phosphorothioate
  modified_base 2: mod_base = OTHER; note = 2'-O-methylcytidine-3'-phosphorothioate
  modified_base 3: mod_base = OTHER; note = 2'-deoxy-2'-fluoroadenosine-3'-phosphate
  modified_base 4: mod_base = OTHER; note = 2'-O-methylguanosine-3'-phosphate
  modified_base 5: mod_base = OTHER; note = 2'-deoxy-2'-fluorocytidine-3'-phosphate
  modified_base 6: mod_base = OTHER; note = 2'-O-methyluridine-3'-phosphate
  modified_base 7: mod_base = OTHER; note = 2'-deoxy-2'-fluoroadenosine-3'-phosphate
  modified_base 8: mod_base = OTHER; note = 2'-O-methyladenosine-3'-phosphate
  modified_base 9: mod_base = OTHER; note = 2'-deoxy-2'-fluoroadenosine-3'-phosphate
  modified_base 10: mod_base = OTHER; note = 2'-deoxy-2'-fluoroadenosine-3'-phosphate
  modified_base 11: mod_base = OTHER; note = 2'-deoxy-2'-fluoroguanosine-3'-phosphate
  modified_base 12: mod_base = OTHER; note = 2'-O-methyladenosine-3'-phosphate
  modified_base 13: mod_base = OTHER; note = 2'-deoxy-2'-fluorocytidine-3'-phosphate
  modified_base 14: mod_base = OTHER; note = 2'-O-methyluridine-3'-phosphate
  modified_base 15: mod_base = OTHER; note = 2'-deoxy-2'-fluorouridine-3'-phosphate
  modified_base 16: mod_base = OTHER; note = 2'-O-methyluridine-3'-phosphate
  modified_base 17: mod_base = OTHER; note = 2'-deoxy-2'-fluoroguanosine-3'-phosphate
  modified_base 18: mod_base = OTHER; note = 2'-O-methyladenosine-3'-phosphate
  modified_base 19: mod_base = OTHER; note = 2'-deoxy-2'-fluorocytidine-3'-phosphate
  modified_base 20: mod_base = OTHER; note = 2'-O-methyluridine-3'-phosphate
  modified_base 21: mod_base = OTHER; note = 2'-deoxy-2'-fluorouridine-3'-phosphate ((2S,4R)-1-[29-[[2-(acetylamino)-2-deoxy-beta-D-galactopyra nosyl]oxy]-14,14-bis[[3-[[3-[[5-[[2-(acetylamino)-2-deoxy-b eta-D-galactopyranosyl]oxy]-1-oxopentyl]amino]propyl]amino] -3-oxopropoxy]methyl]-1,12,19,25-tetraoxo-16-oxa-13,20,24-t riazanonacos-1-yl]-4-hydroxy-2-pyrrolidinyl)methyl ester
gcagctaaaagactttgactt

SEQ ID NO: 333 - RNA, 21 nt, synthetic construct
  source 1..21: mol_type = other RNA
  modified_base 1: mod_base = OTHER; note = 2'-deoxy-2'-fluorocytidine-3'-phosphorothioate
  modified_base 2: mod_base = OTHER; note = 2'-O-methyladenosine-3'-phosphorothioate
  modified_base 3: mod_base = OTHER; note = 2'-deoxy-2'-fluorouridine-3'-phosphate
  modified_base 4: mod_base = OTHER; note = 2'-O-methylcytidine-3'-phosphate
  modified_base 5: mod_base = OTHER; note = 2'-deoxy-2'-fluorocytidine-3'-phosphate
  modified_base 6: mod_base = OTHER; note = 2'-O-methyladenosine-3'-phosphate
  modified_base 7: mod_base = OTHER; note = 2'-deoxy-2'-fluoroguanosine-3'-phosphate
  modified_base 8: mod_base = OTHER; note = 2'-O-methyladenosine-3'-phosphate
  modified_base 9: mod_base = OTHER; note = 2'-deoxy-2'-fluorocytidine-3'-phosphate
  modified_base 10: mod_base = OTHER; note = 2'-deoxy-2'-fluoroadenosine-3'-phosphate
  modified_base 11: mod_base = OTHER; note = 2'-deoxy-2'-fluoroguanosine-3'-phosphate
  modified_base 12: mod_base = OTHER; note = 2'-O-methyladenosine-3'-phosphate
  modified_base 13: mod_base = OTHER; note = 2'-deoxy-2'-fluorocytidine-3'-phosphate
  modified_base 14: mod_base = OTHER; note = 2'-O-methyladenosine-3'-phosphate
  modified_base 15: mod_base = OTHER; note = 2'-deoxy-2'-fluoroadenosine-3'-phosphate
  modified_base 16: mod_base = OTHER; note = 2'-O-methylguanosine-3'-phosphate
  modified_base 17: mod_base = OTHER; note = 2'-deoxy-2'-fluoroadenosine-3'-phosphate
  modified_base 18: mod_base = OTHER; note = 2'-O-methylcytidine-3'-phosphate
  modified_base 19: mod_base = OTHER; note = 2'-deoxy-2'-fluorocytidine-3'-phosphate
  modified_base 20: mod_base = OTHER; note = 2'-O-methyladenosine-3'-phosphate
  modified_base 21: mod_base = OTHER; note = 2'-deoxy-2'-fluorouridine-3'-phosphate ((2S,4R)-1-[29-[[2-(acetylamino)-2-deoxy-beta-D-galactopyra nosyl]oxy]-14,14-bis[[3-[[3-[[5-[[2-(acetylamino)-2-deoxy-b eta-D-galactopyranosyl]oxy]-1-oxopentyl]amino]propyl]amino] -3-oxopropoxy]methyl]-1,12,19,25-tetraoxo-16-oxa-13,20,24-t riazanonacos-1-yl]-4-hydroxy-2-pyrrolidinyl)methyl ester
catccagacagacaagaccat

SEQ ID NO: 334 - RNA, 21 nt, synthetic construct
  source 1..21: mol_type = other RNA
  modified_base 1: mod_base = OTHER; note = 2'-deoxy-2'-fluoroadenosine-3'-phosphorothioate
  modified_base 2: mod_base = OTHER; note = 2'-O-methylcytidine-3'-phosphorothioate
  modified_base 3: mod_base = OTHER; note = 2'-deoxy-2'-fluoroadenosine-3'-phosphate
  modified_base 4: mod_base = OTHER; note = 2'-O-methylguanosine-3'-phosphate
  modified_base 5: mod_base = OTHER; note = 2'-deoxy-2'-fluoroadenosine-3'-phosphate
  modified_base 6: mod_base = OTHER; note = 2'-O-methylcytidine-3'-phosphate
  modified_base 7: mod_base = OTHER; note = 2'-deoxy-2'-fluoroadenosine-3'-phosphate
  modified_base 8: mod_base = OTHER; note = 2'-O-methyladenosine-3'-phosphate
  modified_base 9: mod_base = OTHER; note = 2'-deoxy-2'-fluoroguanosine-3'-phosphate
  modified_base 10: mod_base = OTHER; note = 2'-deoxy-2'-fluoroadenosine-3'-phosphate
  modified_base 11: mod_base = OTHER; note = 2'-deoxy-2'-fluorocytidine-3'-phosphate
  modified_base 12: mod_base = OTHER; note = 2'-O-methylcytidine-3'-phosphate
  modified_base 13: mod_base = OTHER; note = 2'-deoxy-2'-fluoroadenosine-3'-phosphate
  modified_base 14: mod_base = OTHER; note = 2'-O-methyluridine-3'-phosphate
  modified_base 15: mod_base = OTHER; note = 2'-deoxy-2'-fluorocytidine-3'-phosphate
  modified_base 16: mod_base = OTHER; note = 2'-O-methyluridine-3'-phosphate
  modified_base 17: mod_base = OTHER; note = 2'-deoxy-2'-fluoroadenosine-3'-phosphate
  modified_base 18: mod_base = OTHER; note = 2'-O-methylcytidine-3'-phosphate
  modified_base 19: mod_base = OTHER; note = 2'-deoxy-2'-fluoroadenosine-3'-phosphate
  modified_base 20: mod_base = OTHER; note = 2'-O-methylcytidine-3'-phosphate
  modified_base 21: mod_base = OTHER; note = 2'-deoxy-2'-fluorocytidine-3'-phosphate ((2S,4R)-1-[29-[[2-(acetylamino)-2-deoxy-beta-D-galactopyra nosyl]oxy]-14,14-bis[[3-[[3-[[5-[[2-(acetylamino)-2-deoxy-b eta-D-galactopyranosyl]oxy]-1-oxopentyl]amino]propyl]amino] -3-oxopropoxy]methyl]-1,12,19,25-tetraoxo-16-oxa-13,20,24-t riazanonacos-1-yl]-4-hydroxy-2-pyrrolidinyl)methyl ester
acagacaagaccatctacacc

SEQ ID NO: 335 - RNA, 21 nt, synthetic construct
  source 1..21: mol_type = other RNA
  modified_base 1: mod_base = OTHER; note = 2'-deoxy-2'-fluoroadenosine-3'-phosphorothioate
  modified_base 2: mod_base = OTHER; note = 2'-O-methyluridine-3'-phosphorothioate
  modified_base 3: mod_base = OTHER; note = 2'-deoxy-2'-fluorocytidine-3'-phosphate
  modified_base 4: mod_base = OTHER; note = 2'-O-methylcytidine-3'-phosphate
  modified_base 5: mod_base = OTHER; note = 2'-deoxy-2'-fluoroadenosine-3'-phosphate
  modified_base 6: mod_base = OTHER; note = 2'-O-methylguanosine-3'-phosphate
  modified_base 7: mod_base = OTHER; note = 2'-deoxy-2'-fluoroadenosine-3'-phosphate
  modified_base 8: mod_base = OTHER; note = 2'-O-methylcytidine-3'-phosphate
  modified_base 9: mod_base = OTHER; note = 2'-deoxy-2'-fluoroadenosine-3'-phosphate
  modified_base 10: mod_base = OTHER; note = 2'-deoxy-2'-fluoroguanosine-3'-phosphate
  modified_base 11: mod_base = OTHER; note = 2'-deoxy-2'-fluoroadenosine-3'-phosphate
  modified_base 12: mod_base = OTHER; note = 2'-O-methylcytidine-3'-phosphate
  modified_base 13: mod_base = OTHER; note = 2'-deoxy-2'-fluoroadenosine-3'-phosphate
  modified_base 14: mod_base = OTHER; note = 2'-O-methyladenosine-3'-phosphate
  modified_base 15: mod_base = OTHER; note = 2'-deoxy-2'-fluoroguanosine-3'-phosphate
  modified_base 16: mod_base = OTHER; note = 2'-O-methyladenosine-3'-phosphate
  modified_base 17: mod_base = OTHER; note = 2'-deoxy-2'-fluorocytidine-3'-phosphate
  modified_base 18: mod_base = OTHER; note = 2'-O-methylcytidine-3'-phosphate
  modified_base 19: mod_base = OTHER; note = 2'-deoxy-2'-fluoroadenosine-3'-phosphate
  modified_base 20: mod_base = OTHER; note = 2'-O-methyluridine-3'-phosphate
  modified_base 21: mod_base = OTHER; note = 2'-deoxy-2'-fluorocytidine-3'-phosphate ((2S,4R)-1-[29-[[2-(acetylamino)-2-deoxy-beta-D-galactopyra nosyl]oxy]-14,14-bis[[3-[[3-[[5-[[2-(acetylamino)-2-deoxy-b eta-D-galactopyranosyl]oxy]-1-oxopentyl]amino]propyl]amino] -3-oxopropoxy]methyl]-1,12,19,25-tetraoxo-16-oxa-13,20,24-t riazanonacos-1-yl]-4-hydroxy-2-pyrrolidinyl)methyl ester
atccagacagacaagaccatc

SEQ ID NO: 336 - RNA, 21 nt, synthetic construct
  source 1..21: mol_type = other RNA
  modified_base 1: mod_base = OTHER; note = 2'-deoxy-2'-fluorouridine-3'-phosphorothioate
  modified_base 2: mod_base = OTHER; note = 2'-O-methyluridine-3'-phosphorothioate
  modified_base 3: mod_base = OTHER; note = 2'-deoxy-2'-fluorouridine-3'-phosphate
  modified_base 4: mod_base = OTHER; note = 2'-O-methylguanosine-3'-phosphate
  modified_base 5: mod_base = OTHER; note = 2'-deoxy-2'-fluoroadenosine-3'-phosphate
  modified_base 6: mod_base = OTHER; note = 2'-O-methylcytidine-3'-phosphate
  modified_base 7: mod_base = OTHER; note = 2'-deoxy-2'-fluorocytidine-3'-phosphate
  modified_base 8: mod_base = OTHER; note = 2'-O-methyluridine-3'-phosphate
  modified_base 9: mod_base = OTHER; note = 2'-deoxy-2'-fluorocytidine-3'-phosphate
  modified_base 10: mod_base = OTHER; note = 2'-deoxy-2'-fluoroadenosine-3'-phosphate
  modified_base 11: mod_base = OTHER; note = 2'-deoxy-2'-fluorouridine-3'-phosphate
  modified_base 12: mod_base = OTHER; note = 2'-O-methylguanosine-3'-phosphate
  modified_base 13: mod_base = OTHER; note = 2'-deoxy-2'-fluoroguanosine-3'-phosphate
  modified_base 14: mod_base = OTHER; note = 2'-O-methyluridine-3'-phosphate
  modified_base 15: mod_base = OTHER; note = 2'-deoxy-2'-fluoroguanosine-3'-phosphate
  modified_base 16: mod_base = OTHER; note = 2'-O-methyluridine-3'-phosphate
  modified_base 17: mod_base = OTHER; note = 2'-deoxy-2'-fluorouridine-3'-phosphate
  modified_base 18: mod_base = OTHER; note = 2'-O-methylcytidine-3'-phosphate
  modified_base 19: mod_base = OTHER; note = 2'-deoxy-2'-fluoroguanosine-3'-phosphate
  modified_base 20: mod_base = OTHER; note = 2'-O-methyluridine-3'-phosphate
  modified_base 21: mod_base = OTHER; note = 2'-deoxy-2'-fluorouridine-3'-phosphate ((2S,4R)-1-[29-[[2-(acetylamino)-2-deoxy-beta-D-galactopyra nosyl]oxy]-14,14-bis[[3-[[3-[[5-[[2-(acetylamino)-2-deoxy-b eta-D-galactopyranosyl]oxy]-1-oxopentyl]amino]propyl]amino] -3-oxopropoxy]methyl]-1,12,19,25-tetraoxo-16-oxa-13,20,24-t riazanonacos-1-yl]-4-hydroxy-2-pyrrolidinyl)methyl ester
tttgacctcatggtgttcgtt

SEQ ID NO: 337 - RNA, 21 nt, synthetic construct
  source 1..21: mol_type = other RNA
  modified_base 1: mod_base = OTHER; note = 2'-deoxy-2'-fluoroguanosine-3'-phosphorothioate
  modified_base 2: mod_base = OTHER; note = 2'-O-methylguanosine-3'-phosphorothioate
  modified_base 3: mod_base = OTHER; note = 2'-deoxy-2'-fluoroadenosine-3'-phosphate
  modified_base 4: mod_base = OTHER; note = 2'-O-methyluridine-3'-phosphate
  modified_base 5: mod_base = OTHER; note = 2'-deoxy-2'-fluoroguanosine-3'-phosphate
  modified_base 6: mod_base = OTHER; note = 2'-O-methylcytidine-3'-phosphate
  modified_base 7: mod_base = OTHER; note = 2'-deoxy-2'-fluorocytidine-3'-phosphate
  modified_base 8: mod_base = OTHER; note = 2'-O-methyladenosine-3'-phosphate
  modified_base 9: mod_base = OTHER; note = 2'-deoxy-2'-fluoroadenosine-3'-phosphate
  modified_base 10: mod_base = OTHER; note = 2'-deoxy-2'-fluoroguanosine-3'-phosphate
  modified_base 11: mod_base = OTHER; note = 2'-deoxy-2'-fluoroadenosine-3'-phosphate
  modified_base 12: mod_base = OTHER; note = 2'-O-methyladenosine-3'-phosphate
  modified_base 13: mod_base = OTHER; note = 2'-deoxy-2'-fluorocytidine-3'-phosphate
  modified_base 14: mod_base = OTHER; note = 2'-O-methyladenosine-3'-phosphate
  modified_base 15: mod_base = OTHER; note = 2'-deoxy-2'-fluorocytidine-3'-phosphate
  modified_base 16: mod_base = OTHER; note = 2'-O-methyluridine-3'-phosphate
  modified_base 17: mod_base = OTHER; note = 2'-deoxy-2'-fluoroadenosine-3'-phosphate
  modified_base 18: mod_base = OTHER; note = 2'-O-methyluridine-3'-phosphate
  modified_base 19: mod_base = OTHER; note = 2'-deoxy-2'-fluoroguanosine-3'-phosphate
  modified_base 20: mod_base = OTHER; note = 2'-O-methyladenosine-3'-phosphate
  modified_base 21: mod_base = OTHER; note = 2'-deoxy-2'-fluorouridine-3'-phosphate ((2S,4R)-1-[29-[[2-(acetylamino)-2-deoxy-beta-D-galactopyra nosyl]oxy]-14,14-bis[[3-[[3-[[5-[[2-(acetylamino)-2-deoxy-b eta-D-galactopyranosyl]oxy]-1-oxopentyl]amino]propyl]amino] -3-oxopropoxy]methyl]-1,12,19,25-tetraoxo-16-oxa-13,20,24-t riazanonacos-1-yl]-4-hydroxy-2-pyrrolidinyl)methyl ester
ggatgccaagaacactatgat

SEQ ID NO: 338 - RNA, 21 nt, synthetic construct
  source 1..21: mol_type = other RNA
  modified_base 1: mod_base = OTHER; note = 2'-deoxy-2'-fluoroadenosine-3'-phosphorothioate
  modified_base 2: mod_base = OTHER; note = 2'-O-methyladenosine-3'-phosphorothioate
  modified_base 3: mod_base = OTHER; note = 2'-deoxy-2'-fluoroguanosine-3'-phosphate
  modified_base 4: mod_base = OTHER; note = 2'-O-methyladenosine-3'-phosphate
  modified_base 5: mod_base = OTHER; note = 2'-deoxy-2'-fluoroadenosine-3'-phosphate
  modified_base 6: mod_base = OTHER; note = 2'-O-methyladenosine-3'-phosphate
  modified_base 7: mod_base = OTHER; note = 2'-deoxy-2'-fluoroguanosine-3'-phosphate
  modified_base 8: mod_base = OTHER; note = 2'-O-methylguanosine-3'-phosphate
  modified_base 9: mod_base = OTHER; note = 2'-deoxy-2'-fluoroguanosine-3'-phosphate
  modified_base 10: mod_base = OTHER; note = 2'-deoxy-2'-fluoroadenosine-3'-phosphate
  modified_base 11: mod_base = OTHER; note = 2'-deoxy-2'-fluorouridine-3'-phosphate
  modified_base 12: mod_base = OTHER; note = 2'-O-methylcytidine-3'-phosphate
  modified_base 13: mod_base = OTHER; note = 2'-deoxy-2'-fluorouridine-3'-phosphate
  modified_base 14: mod_base = OTHER; note = 2'-O-methylguanosine-3'-phosphate
  modified_base 15: mod_base = OTHER; note = 2'-deoxy-2'-fluorouridine-3'-phosphate
  modified_base 16: mod_base = OTHER; note = 2'-O-methylguanosine-3'-phosphate
  modified_base 17: mod_base = OTHER; note = 2'-deoxy-2'-fluorouridine-3'-phosphate
  modified_base 18: mod_base = OTHER; note = 2'-O-methylguanosine-3'-phosphate
  modified_base 19: mod_base = OTHER; note = 2'-deoxy-2'-fluoroguanosine-3'-phosphate
  modified_base 20: mod_base = OTHER; note = 2'-O-methylcytidine-3'-phosphate
  modified_base 21: mod_base = OTHER; note = 2'-deoxy-2'-fluoroadenosine-3'-phosphate ((2S,4R)-1-[29-[[2-(acetylamino)-2-deoxy-beta-D-galactopyra nosyl]oxy]-14,14-bis[[3-[[3-[[5-[[2-(acetylamino)-2-deoxy-b eta-D-galactopyranosyl]oxy]-1-oxopentyl]amino]propyl]amino] -3-oxopropoxy]methyl]-1,12,19,25-tetraoxo-16-oxa-13,20,24-t riazanonacos-1-yl]-4-hydroxy-2-pyrrolidinyl)methyl ester
aagaaagggatctgtgtggca

SEQ ID NO: 339 - RNA, 21 nt, synthetic construct
  source 1..21: mol_type = other RNA
  modified_base 1: mod_base = OTHER; note = 2'-deoxy-2'-fluorocytidine-3'-phosphorothioate
  modified_base 2: mod_base = OTHER; note = 2'-O-methyladenosine-3'-phosphorothioate
  modified_base 3: mod_base = OTHER; note = 2'-deoxy-2'-fluoroadenosine-3'-phosphate
  modified_base 4: mod_base = OTHER; note = 2'-O-methylguanosine-3'-phosphate
  modified_base 5: mod_base = OTHER; note = 2'-deoxy-2'-fluoroadenosine-3'-phosphate
  modified_base 6: mod_base = OTHER; note = 2'-O-methyladenosine-3'-phosphate
  modified_base 7: mod_base = OTHER; note = 2'-deoxy-2'-fluoroadenosine-3'-phosphate
  modified_base 8: mod_base = OTHER; note = 2'-O-methylguanosine-3'-phosphate
  modified_base 9: mod_base = OTHER; note = 2'-deoxy-2'-fluoroguanosine-3'-phosphate
  modified_base 10: mod_base = OTHER; note = 2'-deoxy-2'-fluoroguanosine-3'-phosphate
  modified_base 11: mod_base = OTHER; note = 2'-deoxy-2'-fluoroadenosine-3'-phosphate
  modified_base 12: mod_base = OTHER; note = 2'-O-methyluridine-3'-phosphate
  modified_base 13: mod_base = OTHER; note = 2'-deoxy-2'-fluorocytidine-3'-phosphate
  modified_base 14: mod_base = OTHER; note = 2'-O-methyluridine-3'-phosphate
  modified_base 15: mod_base = OTHER; note = 2'-deoxy-2'-fluoroguanosine-3'-phosphate
  modified_base 16: mod_base = OTHER; note = 2'-O-methyluridine-3'-phosphate
  modified_base 17: mod_base = OTHER; note = 2'-deoxy-2'-fluoroguanosine-3'-phosphate
  modified_base 18: mod_base = OTHER; note = 2'-O-methyluridine-3'-phosphate
  modified_base 19: mod_base = OTHER; note = 2'-deoxy-2'-fluoroguanosine-3'-phosphate
  modified_base 20: mod_base = OTHER; note = 2'-O-methylguanosine-3'-phosphate
  modified_base 21: mod_base = OTHER; note = 2'-deoxy-2'-fluorocytidine-3'-phosphate ((2S,4R)-1-[29-[[2-(acetylamino)-2-deoxy-beta-D-galactopyra nosyl]oxy]-14,14-bis[[3-[[3-[[5-[[2-(acetylamino)-2-deoxy-b eta-D-galactopyranosyl]oxy]-1-oxopentyl]amino]propyl]amino] -3-oxopropoxy]methyl]-1,12,19,25-tetraoxo-16-oxa-13,20,24-t riazanonacos-1-yl]-4-hydroxy-2-pyrrolidinyl)methyl ester
caagaaagggatctgtgtggc

SEQ ID NO: 340 - RNA, 21 nt, synthetic construct
  source 1..21: mol_type = other RNA
  modified_base 1: mod_base = OTHER; note = 2'-deoxy-2'-fluorouridine-3'-phosphorothioate
  modified_base 2: mod_base = OTHER; note = 2'-O-methyladenosine-3'-phosphorothioate
  modified_base 3: mod_base = OTHER; note = 2'-deoxy-2'-fluorocytidine-3'-phosphate
  modified_base 4: mod_base = OTHER; note = 2'-O-methylguanosine-3'-phosphate
  modified_base 5: mod_base = OTHER; note = 2'-deoxy-2'-fluorouridine-3'-phosphate
  modified_base 6: mod_base = OTHER; note = 2'-O-methylguanosine-3'-phosphate
  modified_base 7: mod_base = OTHER; note = 2'-deoxy-2'-fluoroguanosine-3'-phosphate
  modified_base 8: mod_base = OTHER; note = 2'-O-methyluridine-3'-phosphate
  modified_base 9: mod_base = OTHER; note = 2'-deoxy-2'-fluorocytidine-3'-phosphate
  modified_base 10: mod_base = OTHER; note = 2'-deoxy-2'-fluoroadenosine-3'-phosphate
  modified_base 11: mod_base = OTHER; note = 2'-deoxy-2'-fluoroadenosine-3'-phosphate
  modified_base 12: mod_base = OTHER; note = 2'-O-methylguanosine-3'-phosphate
  modified_base 13: mod_base = OTHER; note = 2'-deoxy-2'-fluoroguanosine-3'-phosphate
  modified_base 14: mod_base = OTHER; note = 2'-O-methyluridine-3'-phosphate
  modified_base 15: mod_base = OTHER; note = 2'-deoxy-2'-fluorocytidine-3'-phosphate
  modified_base 16: mod_base = OTHER; note = 2'-O-methyluridine-3'-phosphate
  modified_base 17: mod_base = OTHER; note = 2'-deoxy-2'-fluorouridine-3'-phosphate
  modified_base 18: mod_base = OTHER; note = 2'-O-methylcytidine-3'-phosphate
  modified_base 19: mod_base = OTHER; note = 2'-deoxy-2'-fluorouridine-3'-phosphate
  modified_base 20: mod_base = OTHER; note = 2'-O-methylcytidine-3'-phosphate
  modified_base 21: mod_base = OTHER; note = 2'-deoxy-2'-fluorouridine-3'-phosphate ((2S,4R)-1-[29-[[2-(acetylamino)-2-deoxy-beta-D-galactopyra nosyl]oxy]-14,14-bis[[3-[[3-[[5-[[2-(acetylamino)-2-deoxy-b eta-D-galactopyranosyl]oxy]-1-oxopentyl]amino]propyl]amino] -3-oxopropoxy]methyl]-1,12,19,25-tetraoxo-16-oxa-13,20,24-t riazanonacos-1-yl]-4-hydroxy-2-pyrrolidinyl)methyl ester
tacgtggtcaaggtcttctct

SEQ ID NO: 341 - RNA, 21 nt, synthetic construct
  source 1..21: mol_type = other RNA
  modified_base 1: mod_base = OTHER; note = 2'-deoxy-2'-fluorocytidine-3'-phosphorothioate
  modified_base 2: mod_base = OTHER; note = 2'-O-methyladenosine-3'-phosphorothioate
  modified_base 3: mod_base = OTHER; note = 2'-deoxy-2'-fluoroguanosine-3'-phosphate
  modified_base 4: mod_base = OTHER; note = 2'-O-methyluridine-3'-phosphate
  modified_base 5: mod_base = OTHER; note = 2'-deoxy-2'-fluorouridine-3'-phosphate
  modified_base 6: mod_base = OTHER; note = 2'-O-methyluridine-3'-phosphate
  modified_base 7: mod_base = OTHER; note = 2'-deoxy-2'-fluorocytidine-3'-phosphate
  modified_base 8: mod_base = OTHER; note = 2'-O-methylguanosine-3'-phosphate
  modified_base 9: mod_base = OTHER; note = 2'-deoxy-2'-fluoroadenosine-3'-phosphate
  modified_base 10: mod_base = OTHER; note = 2'-deoxy-2'-fluoroguanosine-3'-phosphate
  modified_base 11: mod_base = OTHER; note = 2'-deoxy-2'-fluoroguanosine-3'-phosphate
  modified_base 12: mod_base = OTHER; note = 2'-O-methyluridine-3'-phosphate
  modified_base 13: mod_base = OTHER; note = 2'-deoxy-2'-fluorocytidine-3'-phosphate
  modified_base 14: mod_base = OTHER; note = 2'-O-methyladenosine-3'-phosphate
  modified_base 15: mod_base = OTHER; note = 2'-deoxy-2'-fluorouridine-3'-phosphate
  modified_base 16: mod_base = OTHER; note = 2'-O-methyladenosine-3'-phosphate
  modified_base 17: mod_base = OTHER; note = 2'-deoxy-2'-fluoroguanosine-3'-phosphate
  modified_base 18: mod_base = OTHER; note = 2'-O-methyluridine-3'-phosphate
  modified_base 19: mod_base = OTHER; note = 2'-deoxy-2'-fluoroguanosine-3'-phosphate
  modified_base 20: mod_base = OTHER; note = 2'-O-methylguanosine-3'-phosphate
  modified_base 21: mod_base = OTHER; note = 2'-deoxy-2'-fluoroadenosine-3'-phosphate ((2S,4R)-1-[29-[[2-(acetylamino)-2-deoxy-beta-D-galactopyra nosyl]oxy]-14,14-bis[[3-[[3-[[5-[[2-(acetylamino)-2-deoxy-b eta-D-galactopyranosyl]oxy]-1-oxopentyl]amino]propyl]amino] -3-oxopropoxy]methyl]-1,12,19,25-tetraoxo-16-oxa-13,20,24-t riazanonacos-1-yl]-4-hydroxy-2-pyrrolidinyl)methyl ester
cagtttcgaggtcatagtgga

SEQ ID NO: 342 - RNA, 21 nt, synthetic construct
  source 1..21: mol_type = other RNA
  modified_base 1: mod_base = OTHER; note = 2'-deoxy-2'-fluorocytidine-3'-phosphorothioate
  modified_base 2: mod_base = OTHER; note = 2'-O-methylguanosine-3'-phosphorothioate
  modified_base 3: mod_base = OTHER; note = 2'-deoxy-2'-fluorouridine-3'-phosphate
  modified_base 4: mod_base = OTHER; note = 2'-O-methylguanosine-3'-phosphate
  modified_base 5: mod_base = OTHER; note = 2'-deoxy-2'-fluorocytidine-3'-phosphate
  modified_base 6: mod_base = OTHER; note = 2'-O-methylcytidine-3'-phosphate
  modified_base 7: mod_base = OTHER; note = 2'-deoxy-2'-fluoroguanosine-3'-phosphate
  modified_base 8: mod_base = OTHER; note = 2'-O-methylguanosine-3'-phosphate
  modified_base 9: mod_base = OTHER; note = 2'-deoxy-2'-fluoroadenosine-3'-phosphate
  modified_base 10: mod_base = OTHER; note = 2'-deoxy-2'-fluoroadenosine-3'-phosphate
  modified_base 11: mod_base = OTHER; note = 2'-deoxy-2'-fluoroguanosine-3'-phosphate
  modified_base 12: mod_base = OTHER; note = 2'-O-methylguanosine-3'-phosphate
  modified_base 13: mod_base = OTHER; note = 2'-deoxy-2'-fluoroadenosine-3'-phosphate
  modified_base 14: mod_base = OTHER; note = 2'-O-methyladenosine-3'-phosphate
  modified_base 15: mod_base = OTHER; note = 2'-deoxy-2'-fluorouridine-3'-phosphate
  modified_base 16: mod_base = OTHER; note = 2'-O-methylcytidine-3'-phosphate
  modified_base 17: mod_base = OTHER; note = 2'-deoxy-2'-fluoroadenosine-3'-phosphate
  modified_base 18: mod_base = OTHER; note = 2'-O-methylguanosine-3'-phosphate
  modified_base 19: mod_base = OTHER; note = 2'-deoxy-2'-fluoroadenosine-3'-phosphate
  modified_base 20: mod_base = OTHER; note = 2'-O-methyladenosine-3'-phosphate
  modified_base 21: mod_base = OTHER; note = 2'-deoxy-2'-fluorouridine-3'-phosphate ((2S,4R)-1-[29-[[2-(acetylamino)-2-deoxy-beta-D-galactopyra nosyl]oxy]-14,14-bis[[3-[[3-[[5-[[2-(acetylamino)-2-deoxy-b eta-D-galactopyranosyl]oxy]-1-oxopentyl]amino]propyl]amino] -3-oxopropoxy]methyl]-1,12,19,25-tetraoxo-16-oxa-13,20,24-t riazanonacos-1-yl]-4-hydroxy-2-pyrrolidinyl)methyl ester
cgtgccggaaggaatcagaat

SEQ ID NO: 343 - RNA, 21 nt, synthetic construct
  source 1..21: mol_type = other RNA
  modified_base 1: mod_base = OTHER; note = 2'-deoxy-2'-fluoroguanosine-3'-phosphorothioate
  modified_base 2: mod_base = OTHER; note = 2'-O-methyladenosine-3'-phosphorothioate
  modified_base 3: mod_base = OTHER; note = 2'-deoxy-2'-fluoroadenosine-3'-phosphate
  modified_base 4: mod_base = OTHER; note = 2'-O-methyladenosine-3'-phosphate
  modified_base 5: mod_base = OTHER; note = 2'-deoxy-2'-fluoroguanosine-3'-phosphate
  modified_base 6: mod_base = OTHER; note = 2'-O-methylguanosine-3'-phosphate
  modified_base 7: mod_base = OTHER; note = 2'-deoxy-2'-fluoroguanosine-3'-phosphate
  modified_base 8: mod_base = OTHER; note = 2'-O-methyladenosine-3'-phosphate
  modified_base 9: mod_base = OTHER; note = 2'-deoxy-2'-fluorouridine-3'-phosphate
  modified_base 10: mod_base = OTHER; note = 2'-deoxy-2'-fluorocytidine-3'-phosphate
  modified_base 11: mod_base = OTHER; note = 2'-deoxy-2'-fluorouridine-3'-phosphate
  modified_base 12: mod_base = OTHER; note = 2'-O-methylguanosine-3'-phosphate
  modified_base 13: mod_base = OTHER; note = 2'-deoxy-2'-fluorouridine-3'-phosphate
  modified_base 14: mod_base = OTHER; note = 2'-O-methylguanosine-3'-phosphate
  modified_base 15: mod_base = OTHER; note = 2'-deoxy-2'-fluorouridine-3'-phosphate
  modified_base 16: mod_base = OTHER; note = 2'-O-methylguanosine-3'-phosphate
  modified_base 17: mod_base = OTHER; note = 2'-deoxy-2'-fluoroguanosine-3'-phosphate
  modified_base 18: mod_base = OTHER; note = 2'-O-methylcytidine-3'-phosphate
  modified_base 19: mod_base = OTHER; note = 2'-deoxy-2'-fluoroadenosine-3'-phosphate
  modified_base 20: mod_base = OTHER; note = 2'-O-methylguanosine-3'-phosphate
  modified_base 21: mod_base = OTHER; note = 2'-deoxy-2'-fluoroadenosine-3'-phosphate ((2S,4R)-1-[29-[[2-(acetylamino)-2-deoxy-beta-D-galactopyra nosyl]oxy]-14,14-bis[[3-[[3-[[5-[[2-(acetylamino)-2-deoxy-b eta-D-galactopyranosyl]oxy]-1-oxopentyl]amino]propyl]amino] -3-oxopropoxy]methyl]-1,12,19,25-tetraoxo-16-oxa-13,20,24-t riazanonacos-1-yl]-4-hydroxy-2-pyrrolidinyl)methyl ester
gaaagggatctgtgtggcaga

SEQ ID NO: 344 - RNA, 21 nt, synthetic construct
  source 1..21: mol_type = other RNA
  modified_base 1: mod_base = OTHER; note = 2'-deoxy-2'-fluoroguanosine-3'-phosphorothioate
  modified_base 2: mod_base = OTHER; note = 2'-O-methyladenosine-3'-phosphorothioate
  modified_base 3: mod_base = OTHER; note = 2'-deoxy-2'-fluorocytidine-3'-phosphate
  modified_base 4: mod_base = OTHER; note = 2'-O-methyladenosine-3'-phosphate
  modified_base 5: mod_base = OTHER; note = 2'-deoxy-2'-fluoroguanosine-3'-phosphate
  modified_base 6: mod_base = OTHER; note = 2'-O-methyladenosine-3'-phosphate
  modified_base 7: mod_base = OTHER; note = 2'-deoxy-2'-fluorocytidine-3'-phosphate
  modified_base 8: mod_base = OTHER; note = 2'-O-methyladenosine-3'-phosphate
  modified_base 9: mod_base = OTHER; note = 2'-deoxy-2'-fluoroadenosine-3'-phosphate
  modified_base 10: mod_base = OTHER; note = 2'-deoxy-2'-fluoroguanosine-3'-phosphate
  modified_base 11: mod_base = OTHER; note = 2'-deoxy-2'-fluoroadenosine-3'-phosphate
  modified_base 12: mod_base = OTHER; note = 2'-O-methylcytidine-3'-phosphate
  modified_base 13: mod_base = OTHER; note = 2'-deoxy-2'-fluorocytidine-3'-phosphate
  modified_base 14: mod_base = OTHER; note = 2'-O-methyladenosine-3'-phosphate
  modified_base 15: mod_base = OTHER; note = 2'-deoxy-2'-fluorouridine-3'-phosphate
  modified_base 16: mod_base = OTHER; note = 2'-O-methylcytidine-3'-phosphate
  modified_base 17: mod_base = OTHER; note = 2'-deoxy-2'-fluorouridine-3'-phosphate
  modified_base 18: mod_base = OTHER; note = 2'-O-methyladenosine-3'-phosphate
  modified_base 19: mod_base = OTHER; note = 2'-deoxy-2'-fluorocytidine-3'-phosphate
  modified_base 20: mod_base = OTHER; note = 2'-O-methyladenosine-3'-phosphate
  modified_base 21: mod_base = OTHER; note = 2'-deoxy-2'-fluoroadenosine-3'-phosphate ((2S,4R)-1-[29-[[2-(acetylamino)-2-deoxy-beta-D-galactopyra nosyl]oxy]-14,14-bis[[3-[[3-[[5-[[2-(acetylamino)-2-deoxy-b eta-D-galactopyranosyl]oxy]-1-oxopentyl]amino]propyl]amino] -3-oxopropoxy]methyl]-1,12,19,25-tetraoxo-16-oxa-13,20,24-t riazanonacos-1-yl]-4-hydroxy-2-pyrrolidinyl)methyl ester
gacagacaagaccatctacaa

SEQ ID NO: 345 - RNA, 21 nt, synthetic construct
  source 1..21: mol_type = other RNA
  modified_base 1: mod_base = OTHER; note = 2'-deoxy-2'-fluorouridine-3'-phosphorothioate
  modified_base 2: mod_base = OTHER; note = 2'-O-methylguanosine-3'-phosphorothioate
  modified_base 3: mod_base = OTHER; note = 2'-deoxy-2'-fluoroadenosine-3'-phosphate
  modified_base 4: mod_base = OTHER; note = 2'-O-methylcytidine-3'-phosphate
  modified_base 5: mod_base = OTHER; note = 2'-deoxy-2'-fluorocytidine-3'-phosphate
  modified_base 6: mod_base = OTHER; note = 2'-O-methyluridine-3'-phosphate
  modified_base 7: mod_base = OTHER; note = 2'-deoxy-2'-fluorocytidine-3'-phosphate
  modified_base 8: mod_base = OTHER; note = 2'-O-methyladenosine-3'-phosphate
  modified_base 9: mod_base = OTHER; note = 2'-deoxy-2'-fluorouridine-3'-phosphate
  modified_base 10: mod_base = OTHER; note = 2'-deoxy-2'-fluoroguanosine-3'-phosphate
  modified_base 11: mod_base = OTHER; note = 2'-deoxy-2'-fluoroguanosine-3'-phosphate
  modified_base 12: mod_base = OTHER; note = 2'-O-methyluridine-3'-phosphate
  modified_base 13: mod_base = OTHER; note = 2'-deoxy-2'-fluoroguanosine-3'-phosphate
  modified_base 14: mod_base = OTHER; note = 2'-O-methyluridine-3'-phosphate
  modified_base 15: mod_base = OTHER; note = 2'-deoxy-2'-fluorouridine-3'-phosphate
  modified_base 16: mod_base = OTHER; note = 2'-O-methylcytidine-3'-phosphate
  modified_base 17: mod_base = OTHER; note = 2'-deoxy-2'-fluoroguanosine-3'-phosphate
  modified_base 18: mod_base = OTHER; note = 2'-O-methyluridine-3'-phosphate
  modified_base 19: mod_base = OTHER; note = 2'-deoxy-2'-fluoroguanosine-3'-phosphate
  modified_base 20: mod_base = OTHER; note = 2'-O-methyladenosine-3'-phosphate
  modified_base 21: mod_base = OTHER; note = 2'-deoxy-2'-fluorocytidine-3'-phosphate ((2S,4R)-1-[29-[[2-(acetylamino)-2-deoxy-beta-D-galactopyra nosyl]oxy]-14,14-bis[[3-[[3-[[5-[[2-(acetylamino)-2-deoxy-b eta-D-galactopyranosyl]oxy]-1-oxopentyl]amino]propyl]amino] -3-oxopropoxy]methyl]-1,12,19,25-tetraoxo-16-oxa-13,20,24-t riazanonacos-1-yl]-4-hydroxy-2-pyrrolidinyl)methyl ester
tgacctcatggtgttcgtgac

SEQ ID NO: 346 - RNA, 21 nt, synthetic construct
  source 1..21: mol_type = other RNA
  modified_base 1: mod_base = OTHER; note = 2'-deoxy-2'-fluorouridine-3'-phosphorothioate
  modified_base 2: mod_base = OTHER; note = 2'-O-methylguanosine-3'-phosphorothioate
  modified_base 3: mod_base = OTHER; note = 2'-deoxy-2'-fluorouridine-3'-phosphate
  modified_base 4: mod_base = OTHER; note = 2'-O-methyladenosine-3'-phosphate
  modified_base 5: mod_base = OTHER; note = 2'-deoxy-2'-fluoroadenosine-3'-phosphate
  modified_base 6: mod_base = OTHER; note = 2'-O-methyluridine-3'-phosphate
  modified_base 7: mod_base = OTHER; note = 2'-deoxy-2'-fluoroadenosine-3'-phosphate
  modified_base 8: mod_base = OTHER; note = 2'-O-methyladenosine-3'-phosphate
  modified_base 9: mod_base = OTHER; note = 2'-deoxy-2'-fluoroadenosine-3'-phosphate
  modified_base 10: mod_base = OTHER; note = 2'-deoxy-2'-fluorouridine-3'-phosphate
  modified_base 11: mod_base = OTHER; note = 2'-deoxy-2'-fluorouridine-3'-phosphate
  modified_base 12: mod_base = OTHER; note = 2'-O-methylcytidine-3'-phosphate
  modified_base 13: mod_base = OTHER; note = 2'-deoxy-2'-fluoroguanosine-3'-phosphate
  modified_base 14: mod_base = OTHER; note = 2'-O-methyladenosine-3'-phosphate
  modified_base 15: mod_base = OTHER; note = 2'-deoxy-2'-fluorocytidine-3'-phosphate
  modified_base 16: mod_base = OTHER; note = 2'-O-methylcytidine-3'-phosphate
  modified_base 17: mod_base = OTHER; note = 2'-deoxy-2'-fluorouridine-3'-phosphate
  modified_base 18: mod_base = OTHER; note = 2'-O-methylcytidine-3'-phosphate
  modified_base 19: mod_base = OTHER; note = 2'-deoxy-2'-fluoroadenosine-3'-phosphate
  modified_base 20: mod_base = OTHER; note = 2'-O-methyladenosine-3'-phosphate
  modified_base 21: mod_base = OTHER; note = 2'-deoxy-2'-fluoroguanosine-3'-phosphate ((2S,4R)-1-[29-[[2-(acetylamino)-2-deoxy-beta-D-galactopyra nosyl]oxy]-14,14-bis[[3-[[3-[[5-[[2-(acetylamino)-2-deoxy-b eta-D-galactopyranosyl]oxy]-1-oxopentyl]amino]propyl]amino] -3-oxopropoxy]methyl]-1,12,19,25-tetraoxo-16-oxa-13,20,24-t riazanonacos-1-yl]-4-hydroxy-2-pyrrolidinyl)methyl ester
tgtaataaattcgacctcaag

SEQ ID NO: 347 - RNA, 21 nt, synthetic construct
  source 1..21: mol_type = other RNA
  modified_base 1: mod_base = OTHER; note = 2'-deoxy-2'-fluoroadenosine-3'-phosphorothioate
  modified_base 2: mod_base = OTHER; note = 2'-O-methyladenosine-3'-phosphorothioate
  modified_base 3: mod_base = OTHER; note = 2'-deoxy-2'-fluorocytidine-3'-phosphate
  modified_base 4: mod_base = OTHER; note = 2'-O-methyluridine-3'-phosphate
  modified_base 5: mod_base = OTHER; note = 2'-deoxy-2'-fluoroadenosine-3'-phosphate
  modified_base 6: mod_base = OTHER; note = 2'-O-methylcytidine-3'-phosphate
  modified_base 7: mod_base = OTHER; note = 2'-deoxy-2'-fluoroadenosine-3'-phosphate
  modified_base 8: mod_base = OTHER; note = 2'-O-methyluridine-3'-phosphate
  modified_base 9: mod_base = OTHER; note = 2'-deoxy-2'-fluoroguanosine-3'-phosphate
  modified_base 10: mod_base = OTHER; note = 2'-deoxy-2'-fluoroadenosine-3'-phosphate
  modified_base 11: mod_base = OTHER; note = 2'-deoxy-2'-fluoroadenosine-3'-phosphate
  modified_base 12: mod_base = OTHER; note = 2'-O-methylcytidine-3'-phosphate
  modified_base 13: mod_base = OTHER; note = 2'-deoxy-2'-fluorocytidine-3'-phosphate
  modified_base 14: mod_base = OTHER; note = 2'-O-methyluridine-3'-phosphate
  modified_base 15: mod_base = OTHER; note = 2'-deoxy-2'-fluoroadenosine-3'-phosphate
  modified_base 16: mod_base = OTHER; note = 2'-O-methylcytidine-3'-phosphate
  modified_base 17: mod_base = OTHER; note = 2'-deoxy-2'-fluoroadenosine-3'-phosphate
  modified_base 18: mod_base = OTHER; note = 2'-O-methylguanosine-3'-phosphate
  modified_base 19: mod_base = OTHER; note = 2'-deoxy-2'-fluoroadenosine-3'-phosphate
  modified_base 20: mod_base = OTHER; note = 2'-O-methylguanosine-3'-phosphate
  modified_base 21: mod_base = OTHER; note = 2'-deoxy-2'-fluoroadenosine-3'-phosphate ((2S,4R)-1-[29-[[2-(acetylamino)-2-deoxy-beta-D-galactopyra nosyl]oxy]-14,14-bis[[3-[[3-[[5-[[2-(acetylamino)-2-deoxy-b eta-D-galactopyranosyl]oxy]-1-oxopentyl]amino]propyl]amino] -3-oxopropoxy]methyl]-1,12,19,25-tetraoxo-16-oxa-13,20,24-t riazanonacos-1-yl]-4-hydroxy-2-pyrrolidinyl)methyl ester
aactacatgaacctacagaga

SEQ ID NO: 348 - RNA, 23 nt, synthetic construct
  source 1..23: mol_type = other RNA
  modified_base 1: mod_base = OTHER; note = 2'-O-methyladenosine-3'-phosphorothioate
  modified_base 2: mod_base = OTHER; note = 2'-deoxy-2'-fluoroguanosine-3'-phosphorothioate
  modified_base 3: mod_base = OTHER; note = 2'-O-methyladenosine-3'-phosphate
  modified_base 4: mod_base = OTHER; note = 2'-deoxy-2'-fluoroguanosine-3'-phosphate
  modified_base 5: mod_base = OTHER; note = 2'-O-methyladenosine-3'-phosphate
  modified_base 6: mod_base = OTHER; note = 2'-deoxy-2'-fluoroguanosine-3'-phosphate
  modified_base 7: mod_base = OTHER; note = 2'-O-methyladenosine-3'-phosphate
  modified_base 8: mod_base = OTHER; note = 2'-deoxy-2'-fluoroadenosine-3'-phosphate
  modified_base 9: mod_base = OTHER; note = 2'-O-methylguanosine-3'-phosphate
  modified_base 10: mod_base = OTHER; note = 2'-deoxy-2'-fluoroadenosine-3'-phosphate
  modified_base 11: mod_base = OTHER; note = 2'-O-methylcytidine-3'-phosphate
  modified_base 12: mod_base = OTHER; note = 2'-O-methylcytidine-3'-phosphate
  modified_base 13: mod_base = OTHER; note = 2'-O-methyluridine-3'-phosphate
  modified_base 14: mod_base = OTHER; note = 2'-deoxy-2'-fluorouridine-3'-phosphate
  modified_base 15: mod_base = OTHER; note = 2'-O-methylguanosine-3'-phosphate
  modified_base 16: mod_base = OTHER; note = 2'-deoxy-2'-fluoroadenosine-3'-phosphate
  modified_base 17: mod_base = OTHER; note = 2'-O-methylcytidine-3'-phosphate
  modified_base 18: mod_base = OTHER; note = 2'-deoxy-2'-fluorocytidine-3'-phosphate
  modified_base 19: mod_base = OTHER; note = 2'-O-methyladenosine-3'-phosphate
  modified_base 20: mod_base = OTHER; note = 2'-deoxy-2'-fluorocytidine-3'-phosphate
  modified_base 21: mod_base = OTHER; note = 2'-O-methylguanosine-3'-phosphorothioate
  modified_base 22: mod_base = OTHER; note = 2'-O-methyluridine-3'-phosphorothioate
  modified_base 23: mod_base = OTHER; note = 2'-O-methyladenosine
agagagaagaccttgaccacgta

SEQ ID NO: 349 - RNA, 23 nt, synthetic construct
  source 1..23: mol_type = other RNA
  modified_base 1: mod_base = OTHER; note = 2'-O-methyluridine-3'-phosphorothioate
  modified_base 2: mod_base = OTHER; note = 2'-deoxy-2'-fluoroadenosine-3'-phosphorothioate
  modified_base 3: mod_base = OTHER; note = 2'-O-methylguanosine-3'-phosphate
  modified_base 4: mod_base = OTHER; note = 2'-deoxy-2'-fluoroadenosine-3'-phosphate
  modified_base 5: mod_base = OTHER; note = 2'-O-methylguanosine-3'-phosphate
  modified_base 6: mod_base = OTHER; note = 2'-deoxy-2'-fluoroadenosine-3'-phosphate
  modified_base 7: mod_base = OTHER; note = 2'-O-methyladenosine-3'-phosphate
  modified_base 8: mod_base = OTHER; note = 2'-deoxy-2'-fluoroguanosine-3'-phosphate
  modified_base 9: mod_base = OTHER; note = 2'-O-methyladenosine-3'-phosphate
  modified_base 10: mod_base = OTHER; note = 2'-deoxy-2'-fluorocytidine-3'-phosphate
  modified_base 11: mod_base = OTHER; note = 2'-O-methylcytidine-3'-phosphate
  modified_base 12: mod_base = OTHER; note = 2'-O-methyluridine-3'-phosphate
  modified_base 13: mod_base = OTHER; note = 2'-O-methyluridine-3'-phosphate
  modified_base 14: mod_base = OTHER; note = 2'-deoxy-2'-fluoroguanosine-3'-phosphate
  modified_base 15: mod_base = OTHER; note = 2'-O-methyladenosine-3'-phosphate
  modified_base 16: mod_base = OTHER; note = 2'-deoxy-2'-fluorocytidine-3'-phosphate
  modified_base 17: mod_base = OTHER; note = 2'-O-methylcytidine-3'-phosphate
  modified_base 18: mod_base = OTHER; note = 2'-deoxy-2'-fluoroadenosine-3'-phosphate
  modified_base 19: mod_base = OTHER; note = 2'-O-methylcytidine-3'-phosphate
  modified_base 20: mod_base = OTHER; note = 2'-deoxy-2'-fluoroguanosine-3'-phosphate
  modified_base 21: mod_base = OTHER; note = 2'-O-methyluridine-3'-phosphorothioate
  modified_base 22: mod_base = OTHER; note = 2'-O-methyladenosine-3'-phosphorothioate
  modified_base 23: mod_base = OTHER; note = 2'-O-methylguanosine
tagagaagaccttgaccacgtag

SEQ ID NO: 350 - RNA, 23 nt, synthetic construct
  source 1..23: mol_type = other RNA
  modified_base 1: mod_base = OTHER; note = 2'-O-methylcytidine-3'-phosphorothioate
  modified_base 2: mod_base = OTHER; note = 2'-deoxy-2'-fluoroadenosine-3'-phosphorothioate
  modified_base 3: mod_base = OTHER; note = 2'-O-methylcytidine-3'-phosphate
  modified_base 4: mod_base = OTHER; note = 2'-deoxy-2'-fluoroguanosine-3'-phosphate
  modified_base 5: mod_base = OTHER; note = 2'-O-methyladenosine-3'-phosphate
  modified_base 6: mod_base = OTHER; note = 2'-deoxy-2'-fluoroadenosine-3'-phosphate
  modified_base 7: mod_base = OTHER; note = 2'-O-methylcytidine-3'-phosphate
  modified_base 8: mod_base = OTHER; note = 2'-deoxy-2'-fluoroadenosine-3'-phosphate
  modified_base 9: mod_base = OTHER; note = 2'-O-methylcytidine-3'-phosphate
  modified_base 10: mod_base = OTHER; note = 2'-deoxy-2'-fluorocytidine-3'-phosphate
  modified_base 11: mod_base = OTHER; note = 2'-O-methyladenosine-3'-phosphate
  modified_base 12: mod_base = OTHER; note = 2'-O-methyluridine-3'-phosphate
  modified_base 13: mod_base = OTHER; note = 2'-O-methylguanosine-3'-phosphate
  modified_base 14: mod_base = OTHER; note = 2'-deoxy-2'-fluoroadenosine-3'-phosphate
  modified_base 15: mod_base = OTHER; note = 2'-O-methylguanosine-3'-phosphate
  modified_base 16: mod_base = OTHER; note = 2'-deoxy-2'-fluoroguanosine-3'-phosphate
  modified_base 17: mod_base = OTHER; note = 2'-O-methyluridine-3'-phosphate
  modified_base 18: mod_base = OTHER; note = 2'-deoxy-2'-fluorocytidine-3'-phosphate
  modified_base 19: mod_base = OTHER; note = 2'-O-methyladenosine-3'-phosphate
  modified_base 20: mod_base = OTHER; note = 2'-deoxy-2'-fluoroadenosine-3'-phosphate
  modified_base 21: mod_base = OTHER; note = 2'-O-methyladenosine-3'-phosphorothioate
  modified_base 22: mod_base = OTHER; note = 2'-O-methylguanosine-3'-phosphorothioate
  modified_base 23: mod_base = OTHER; note = 2'-O-methylguanosine
cacgaacaccatgaggtcaaagg

SEQ ID NO: 351 - RNA, 23 nt, synthetic construct
  source 1..23: mol_type = other RNA
  modified_base 1: mod_base = OTHER; note = 2'-O-methyluridine-3'-phosphorothioate
  modified_base 2: mod_base = OTHER; note = 2'-deoxy-2'-fluorouridine-3'-phosphorothioate
  modified_base 3: mod_base = OTHER; note = 2'-O-methyluridine-3'-phosphate
  modified_base 4: mod_base = OTHER; note = 2'-deoxy-2'-fluorouridine-3'-phosphate
  modified_base 5: mod_base = OTHER; note = 2'-O-methylguanosine-3'-phosphate
  modified_base 6: mod_base = OTHER; note = 2'-deoxy-2'-fluorouridine-3'-phosphate
  modified_base 7: mod_base = OTHER; note = 2'-O-methyladenosine-3'-phosphate
  modified_base 8: mod_base = OTHER; note = 2'-deoxy-2'-fluorouridine-3'-phosphate
  modified_base 9: mod_base = OTHER; note = 2'-O-methylguanosine-3'-phosphate
  modified_base 10: mod_base = OTHER; note = 2'-deoxy-2'-fluoroadenosine-3'-phosphate
  modified_base 11: mod_base = OTHER; note = 2'-O-methyladenosine-3'-phosphate
  modified_base 12: mod_base = OTHER; note = 2'-O-methylguanosine-3'-phosphate
  modified_base 13: mod_base = OTHER; note = 2'-O-methylcytidine-3'-phosphate
  modified_base 14: mod_base = OTHER; note = 2'-deoxy-2'-fluoroadenosine-3'-phosphate
  modified_base 15: mod_base = OTHER; note = 2'-O-methyladenosine-3'-phosphate
  modified_base 16: mod_base = OTHER; note = 2'-deoxy-2'-fluorouridine-3'-phosphate
  modified_base 17: mod_base = OTHER; note = 2'-O-methyluridine-3'-phosphate
  modified_base 18: mod_base = OTHER; note = 2'-deoxy-2'-fluorocytidine-3'-phosphate
  modified_base 19: mod_base = OTHER; note = 2'-O-methyluridine-3'-phosphate
  modified_base 20: mod_base = OTHER; note = 2'-deoxy-2'-fluorocytidine-3'-phosphate
  modified_base 21: mod_base = OTHER; note = 2'-O-methylcytidine-3'-phosphorothioate
  modified_base 22: mod_base = OTHER; note = 2'-O-methyluridine-3'-phosphorothioate
  modified_base 23: mod_base = OTHER; note = 2'-O-methylcytidine
ttttgtatgaagcaattctcctc

SEQ ID NO: 352 - RNA, 23 nt, synthetic construct
  source 1..23: mol_type = other RNA
  modified_base 1: mod_base = OTHER; note = 2'-O-methyluridine-3'-phosphorothioate
  modified_base 2: mod_base = OTHER; note = 2'-deoxy-2'-fluorocytidine-3'-phosphorothioate
  modified_base 3: mod_base = OTHER; note = 2'-O-methylcytidine-3'-phosphate
  modified_base 4: mod_base = OTHER; note = 2'-deoxy-2'-fluoroadenosine-3'-phosphate
  modified_base 5: mod_base = OTHER; note = 2'-O-methylguanosine-3'-phosphate
  modified_base 6: mod_base = OTHER; note = 2'-deoxy-2'-fluoroguanosine-3'-phosphate
  modified_base 7: mod_base = OTHER; note = 2'-O-methyladenosine-3'-phosphate
  modified_base 8: mod_base = OTHER; note = 2'-deoxy-2'-fluorouridine-3'-phosphate
  modified_base 9: mod_base = OTHER; note = 2'-O-methylcytidine-3'-phosphate
  modified_base 10: mod_base = OTHER; note = 2'-deoxy-2'-fluoroadenosine-3'-phosphate
  modified_base 11: mod_base = OTHER; note = 2'-O-methylguanosine-3'-phosphate
  modified_base 12: mod_base = OTHER; note = 2'-O-methylcytidine-3'-phosphate
  modified_base 13: mod_base = OTHER; note = 2'-O-methylcytidine-3'-phosphate
  modified_base 14: mod_base = OTHER; note = 2'-deoxy-2'-fluoroadenosine-3'-phosphate
  modified_base 15: mod_base = OTHER; note = 2'-O-methyluridine-3'-phosphate
  modified_base 16: mod_base = OTHER; note = 2'-deoxy-2'-fluorouridine-3'-phosphate
  modified_base 17: mod_base = OTHER; note = 2'-O-methyluridine-3'-phosphate
  modified_base 18: mod_base = OTHER; note = 2'-deoxy-2'-fluoroadenosine-3'-phosphate
  modified_base 19: mod_base = OTHER; note = 2'-O-methyladenosine-3'-phosphate
  modified_base 20: mod_base = OTHER; note = 2'-deoxy-2'-fluorocytidine-3'-phosphate
  modified_base 21: mod_base = OTHER; note = 2'-O-methyladenosine-3'-phosphorothioate
  modified_base 22: mod_base = OTHER; note = 2'-O-methylguanosine-3'-phosphorothioate
  modified_base 23: mod_base = OTHER; note = 2'-O-methylcytidine
tccaggatcagccatttaacagc

SEQ ID NO: 353 - RNA, 23 nt, synthetic construct
  source 1..23: mol_type = other RNA
  modified_base 1: mod_base = OTHER; note = 2'-O-methylguanosine-3'-phosphorothioate
  modified_base 2: mod_base = OTHER; note = 2'-deoxy-2'-fluorouridine-3'-phosphorothioate
  modified_base 3: mod_base = OTHER; note = 2'-O-methylguanosine-3'-phosphate
  modified_base 4: mod_base = OTHER; note = 2'-deoxy-2'-fluorouridine-3'-phosphate
  modified_base 5: mod_base = OTHER; note = 2'-O-methyladenosine-3'-phosphate
  modified_base 6: mod_base = OTHER; note = 2'-deoxy-2'-fluoroguanosine-3'-phosphate
  modified_base 7: mod_base = OTHER; note = 2'-O-methyladenosine-3'-phosphate
  modified_base 8: mod_base = OTHER; note = 2'-deoxy-2'-fluorouridine-3'-phosphate
  modified_base 9: mod_base = OTHER; note = 2'-O-methylguanosine-3'-phosphate
  modified_base 10: mod_base = OTHER; note = 2'-deoxy-2'-fluoroguanosine-3'-phosphate
  modified_base 11: mod_base = OTHER; note = 2'-O-methyluridine-3'-phosphate
  modified_base 12: mod_base = OTHER; note = 2'-O-methylcytidine-3'-phosphate
  modified_base 13: mod_base = OTHER; note = 2'-O-methyluridine-3'-phosphate
  modified_base 14: mod_base = OTHER; note = 2'-deoxy-2'-fluorouridine-3'-phosphate
  modified_base 15: mod_base = OTHER; note = 2'-O-methylguanosine-3'-phosphate
  modified_base 16: mod_base = OTHER; note = 2'-deoxy-2'-fluorouridine-3'-phosphate
  modified_base 17: mod_base = OTHER; note = 2'-O-methylcytidine-3'-phosphate
  modified_base 18: mod_base = OTHER; note = 2'-deoxy-2'-fluorouridine-3'-phosphate
  modified_base 19: mod_base = OTHER; note = 2'-O-methylguanosine-3'-phosphate
  modified_base 20: mod_base = OTHER; note = 2'-deoxy-2'-fluorouridine-3'-phosphate
  modified_base 21: mod_base = OTHER; note = 2'-O-methylcytidine-3'-phosphorothioate
  modified_base 22: mod_base = OTHER; note = 2'-O-methyluridine-3'-phosphorothioate
  modified_base 23: mod_base = OTHER; note = 2'-O-methylguanosine
gtgtagatggtcttgtctgtctg

SEQ ID NO: 354 - RNA, 23 nt, synthetic construct
  source 1..23: mol_type = other RNA
  modified_base 1: mod_base = OTHER; note = 2'-O-methyluridine-3'-phosphorothioate
  modified_base 2: mod_base = OTHER; note = 2'-deoxy-2'-fluoroadenosine-3'-phosphorothioate
  modified_base 3: mod_base = OTHER; note = 2'-O-methylguanosine-3'-phosphate
  modified_base 4: mod_base = OTHER; note = 2'-deoxy-2'-fluoroadenosine-3'-phosphate
  modified_base 5: mod_base = OTHER; note = 2'-O-methyluridine-3'-phosphate
  modified_base 6: mod_base = OTHER; note = 2'-deoxy-2'-fluoroguanosine-3'-phosphate
  modified_base 7: mod_base = OTHER; note = 2'-O-methylguanosine-3'-phosphate
  modified_base 8: mod_base = OTHER; note = 2'-deoxy-2'-fluorouridine-3'-phosphate
  modified_base 9: mod_base = OTHER; note = 2'-O-methylcytidine-3'-phosphate
  modified_base 10: mod_base = OTHER; note = 2'-deoxy-2'-fluorouridine-3'-phosphate
  modified_base 11: mod_base = OTHER; note = 2'-O-methyluridine-3'-phosphate
  modified_base 12: mod_base = OTHER; note = 2'-O-methylguanosine-3'-phosphate
  modified_base 13: mod_base = OTHER; note = 2'-O-methyluridine-3'-phosphate
  modified_base 14: mod_base = OTHER; note = 2'-deoxy-2'-fluorocytidine-3'-phosphate
  modified_base 15: mod_base = OTHER; note = 2'-O-methyluridine-3'-phosphate
  modified_base 16: mod_base = OTHER; note = 2'-deoxy-2'-fluoroguanosine-3'-phosphate
  modified_base 17: mod_base = OTHER; note = 2'-O-methyluridine-3'-phosphate
  modified_base 18: mod_base = OTHER; note = 2'-deoxy-2'-fluorocytidine-3'-phosphate
  modified_base 19: mod_base = OTHER; note = 2'-O-methyluridine-3'-phosphate
  modified_base 20: mod_base = OTHER; note = 2'-deoxy-2'-fluoroguanosine-3'-phosphate
  modified_base 21: mod_base = OTHER; note = 2'-O-methylguanosine-3'-phosphorothioate
  modified_base 22: mod_base = OTHER; note = 2'-O-methyladenosine-3'-phosphorothioate
  modified_base 23: mod_base = OTHER; note = 2'-O-methyluridine
tagatggtcttgtctgtctggat

SEQ ID NO: 355 - RNA, 23 nt, synthetic construct
  source 1..23: mol_type = other RNA
  modified_base 1: mod_base = OTHER; note = 2'-O-methyluridine-3'-phosphorothioate
  modified_base 2: mod_base = OTHER; note = 2'-deoxy-2'-fluorouridine-3'-phosphorothioate
  modified_base 3: mod_base = OTHER; note = 2'-O-methylcytidine-3'-phosphate
  modified_base 4: mod_base = OTHER; note = 2'-deoxy-2'-fluorouridine-3'-phosphate
  modified_base 5: mod_base = OTHER; note = 2'-O-methyluridine-3'-phosphate
  modified_base 6: mod_base = OTHER; note = 2'-deoxy-2'-fluoroguanosine-3'-phosphate
  modified_base 7: mod_base = OTHER; note = 2'-O-methylguanosine-3'-phosphate
  modified_base 8: mod_base = OTHER; note = 2'-deoxy-2'-fluorouridine-3'-phosphate
  modified_base 9: mod_base = OTHER; note = 2'-O-methylguanosine-3'-phosphate
  modified_base 10: mod_base = OTHER; note = 2'-deoxy-2'-fluoroadenosine-3'-phosphate
  modified_base 11: mod_base = OTHER; note = 2'-O-methyladenosine-3'-phosphate
  modified_base 12: mod_base = OTHER; note = 2'-O-methylguanosine-3'-phosphate
  modified_base 13: mod_base = OTHER; note = 2'-O-methyluridine-3'-phosphate
  modified_base 14: mod_base = OTHER; note = 2'-deoxy-2'-fluoroguanosine-3'-phosphate
  modified_base 15: mod_base = OTHER; note = 2'-O-methylguanosine-3'-phosphate
  modified_base 16: mod_base = OTHER; note = 2'-deoxy-2'-fluoroadenosine-3'-phosphate
  modified_base 17: mod_base = OTHER; note = 2'-O-methyluridine-3'-phosphate
  modified_base 18: mod_base = OTHER; note = 2'-deoxy-2'-fluorocytidine-3'-phosphate
  modified_base 19: mod_base = OTHER; note = 2'-O-methyluridine-3'-phosphate
  modified_base 20: mod_base = OTHER; note = 2'-deoxy-2'-fluoroguanosine-3'-phosphate
  modified_base 21: mod_base = OTHER; note = 2'-O-methylguanosine-3'-phosphorothioate
  modified_base 22: mod_base = OTHER; note = 2'-O-methyluridine-3'-phosphorothioate
  modified_base 23: mod_base = OTHER; note = 2'-O-methyladenosine
ttcttggtgaagtggatctggta

SEQ ID NO: 356 - RNA, 23 nt, synthetic construct
  source 1..23: mol_type = other RNA
  modified_base 1: mod_base = OTHER; note = 2'-O-methyluridine-3'-phosphorothioate
  modified_base 2: mod_base = OTHER; note = 2'-deoxy-2'-fluorocytidine-3'-phosphorothioate
  modified_base 3: mod_base = OTHER; note = 2'-O-methyladenosine-3'-phosphate
  modified_base 4: mod_base = OTHER; note = 2'-deoxy-2'-fluorocytidine-3'-phosphate
  modified_base 5: mod_base = OTHER; note = 2'-O-methylguanosine-3'-phosphate
  modified_base 6: mod_base = OTHER; note = 2'-deoxy-2'-fluoroadenosine-3'-phosphate
  modified_base 7: mod_base = OTHER; note = 2'-O-methyladenosine-3'-phosphate
  modified_base 8: mod_base = OTHER; note = 2'-deoxy-2'-fluorocytidine-3'-phosphate
  modified_base 9: mod_base = OTHER; note = 2'-O-methyladenosine-3'-phosphate
  modified_base 10: mod_base = OTHER; note = 2'-deoxy-2'-fluorocytidine-3'-phosphate
  modified_base 11: mod_base = OTHER; note = 2'-O-methylcytidine-3'-phosphate
  modified_base 12: mod_base = OTHER; note = 2'-O-methyladenosine-3'-phosphate
  modified_base 13: mod_base = OTHER; note = 2'-O-methyluridine-3'-phosphate
  modified_base 14: mod_base = OTHER; note = 2'-deoxy-2'-fluoroguanosine-3'-phosphate
  modified_base 15: mod_base = OTHER; note = 2'-O-methyladenosine-3'-phosphate
  modified_base 16: mod_base = OTHER; note = 2'-deoxy-2'-fluoroguanosine-3'-phosphate
  modified_base 17: mod_base = OTHER; note = 2'-O-methylguanosine-3'-phosphate
  modified_base 18: mod_base = OTHER; note = 2'-deoxy-2'-fluorouridine-3'-phosphate
  modified_base 19: mod_base = OTHER; note = 2'-O-methylcytidine-3'-phosphate
  modified_base 20: mod_base = OTHER; note = 2'-deoxy-2'-fluoroadenosine-3'-phosphate
  modified_base 21: mod_base = OTHER; note = 2'-O-methyladenosine-3'-phosphorothioate
  modified_base 22: mod_base = OTHER; note = 2'-O-methyladenosine-3'-phosphorothioate
  modified_base 23: mod_base = OTHER; note = 2'-O-methylguanosine
tcacgaacaccatgaggtcaaag

SEQ ID NO: 357 - RNA, 23 nt, synthetic construct
  source 1..23: mol_type = other RNA
  modified_base 1: mod_base = OTHER; note = 2'-O-methyladenosine-3'-phosphorothioate
  modified_base 2: mod_base = OTHER; note = 2'-deoxy-2'-fluorouridine-3'-phosphorothioate
  modified_base 3: mod_base = OTHER; note = 2'-O-methyluridine-3'-phosphate
  modified_base 4: mod_base = OTHER; note = 2'-deoxy-2'-fluoroadenosine-3'-phosphate
  modified_base 5: mod_base = OTHER; note = 2'-O-methylcytidine-3'-phosphate
  modified_base 6: mod_base = OTHER; note = 2'-deoxy-2'-fluorouridine-3'-phosphate
  modified_base 7: mod_base = OTHER; note = 2'-O-methylguanosine-3'-phosphate
  modified_base 8: mod_base = OTHER; note = 2'-deoxy-2'-fluorouridine-3'-phosphate
  modified_base 9: mod_base = OTHER; note = 2'-O-methylguanosine-3'-phosphate
  modified_base 10: mod_base = OTHER; note = 2'-deoxy-2'-fluoroadenosine-3'-phosphate
  modified_base 11: mod_base = OTHER; note = 2'-O-methylcytidine-3'-phosphate
  modified_base 12: mod_base = OTHER; note = 2'-O-methylcytidine-3'-phosphate
  modified_base 13: mod_base = OTHER; note = 2'-O-methyluridine-3'-phosphate
  modified_base 14: mod_base = OTHER; note = 2'-deoxy-2'-fluorocytidine-3'-phosphate
  modified_base 15: mod_base = OTHER; note = 2'-O-methylguanosine-3'-phosphate
  modified_base 16: mod_base = OTHER; note = 2'-deoxy-2'-fluoroadenosine-3'-phosphate
  modified_base 17: mod_base = OTHER; note = 2'-O-methyladenosine-3'-phosphate
  modified_base 18: mod_base = OTHER; note = 2'-deoxy-2'-fluoroguanosine-3'-phosphate
  modified_base 19: mod_base = OTHER; note = 2'-O-methylguanosine-3'-phosphate
  modified_base 20: mod_base = OTHER; note = 2'-deoxy-2'-fluoroguanosine-3'-phosphate
  modified_base 21: mod_base = OTHER; note = 2'-O-methylguanosine-3'-phosphorothioate
  modified_base 22: mod_base = OTHER; note = 2'-O-methyluridine-3'-phosphorothioate
  modified_base 23: mod_base = OTHER; note = 2'-O-methylcytidine
attactgtgacctcgaaggggtc

SEQ ID NO: 358 - RNA, 23 nt, synthetic construct
  source 1..23: mol_type = other RNA
  modified_base 1: mod_base = OTHER; note = 2'-O-methyladenosine-3'-phosphorothioate
  modified_base 2: mod_base = OTHER; note = 2'-deoxy-2'-fluoroadenosine-3'-phosphorothioate
  modified_base 3: mod_base = OTHER; note = 2'-O-methylcytidine-3'-phosphate
  modified_base 4: mod_base = OTHER; note = 2'-deoxy-2'-fluoroadenosine-3'-phosphate
  modified_base 5: mod_base = OTHER; note = 2'-O-methylguanosine-3'-phosphate
  modified_base 6: mod_base = OTHER; note = 2'-deoxy-2'-fluorocytidine-3'-phosphate
  modified_base 7: mod_base = OTHER; note = 2'-O-methylcytidine-3'-phosphate
  modified_base 8: mod_base = OTHER; note = 2'-deoxy-2'-fluoroadenosine-3'-phosphate
  modified_base 9: mod_base = OTHER; note = 2'-O-methylcytidine-3'-phosphate
  modified_base 10: mod_base = OTHER; note = 2'-deoxy-2'-fluoroadenosine-3'-phosphate
  modified_base 11: mod_base = OTHER; note = 2'-O-methylguanosine-3'-phosphate
  modified_base 12: mod_base = OTHER; note = 2'-O-methyluridine-3'-phosphate
  modified_base 13: mod_base = OTHER; note = 2'-O-methyluridine-3'-phosphate
  modified_base 14: mod_base = OTHER; note = 2'-deoxy-2'-fluorouridine-3'-phosphate
  modified_base 15: mod_base = OTHER; note = 2'-O-methyluridine-3'-phosphate
  modified_base 16: mod_base = OTHER; note = 2'-deoxy-2'-fluoroguanosine-3'-phosphate
  modified_base 17: mod_base = OTHER; note = 2'-O-methyluridine-3'-phosphate
  modified_base 18: mod_base = OTHER; note = 2'-deoxy-2'-fluorouridine-3'-phosphate
  modified_base 19: mod_base = OTHER; note = 2'-O-methylcytidine-3'-phosphate
  modified_base 20: mod_base = OTHER; note = 2'-deoxy-2'-fluoroadenosine-3'-phosphate
  modified_base 21: mod_base = OTHER; note = 2'-O-methyluridine-3'-phosphorothioate
  modified_base 22: mod_base = OTHER; note = 2'-O-methyluridine-3'-phosphorothioate
  modified_base 23: mod_base = OTHER; note = 2'-O-methylcytidine
aacagccacagttttgttcattc

SEQ ID NO: 359 - RNA, 23 nt, synthetic construct
  source 1..23: mol_type = other RNA
  modified_base 1: mod_base = OTHER; note = 2'-O-methyluridine-3'-phosphorothioate
  modified_base 2: mod_base = OTHER; note = 2'-deoxy-2'-fluoroguanosine-3'-phosphorothioate
  modified_base 3: mod_base = OTHER; note = 2'-O-methyluridine-3'-phosphate
  modified_base 4: mod_base = OTHER; note = 2'-deoxy-2'-fluoroadenosine-3'-phosphate
  modified_base 5: mod_base = OTHER; note = 2'-O-methylguanosine-3'-phosphate
  modified_base 6: mod_base = OTHER; note = 2'-deoxy-2'-fluoroadenosine-3'-phosphate
  modified_base 7: mod_base = OTHER; note = 2'-O-methyluridine-3'-phosphate
  modified_base 8: mod_base = OTHER; note = 2'-deoxy-2'-fluoroguanosine-3'-phosphate
  modified_base 9: mod_base = OTHER; note = 2'-O-methylguanosine-3'-phosphate
  modified_base 10: mod_base = OTHER; note = 2'-deoxy-2'-fluorouridine-3'-phosphate
  modified_base 11: mod_base = OTHER; note = 2'-O-methylcytidine-3'-phosphate
  modified_base 12: mod_base = OTHER; note = 2'-O-methyluridine-3'-phosphate
  modified_base 13: mod_base = OTHER; note = 2'-O-methyluridine-3'-phosphate
  modified_base 14: mod_base = OTHER; note = 2'-deoxy-2'-fluoroguanosine-3'-phosphate
  modified_base 15: mod_base = OTHER; note = 2'-O-methyluridine-3'-phosphate
  modified_base 16: mod_base = OTHER; note = 2'-deoxy-2'-fluorocytidine-3'-phosphate
  modified_base 17: mod_base = OTHER; note = 2'-O-methyluridine-3'-phosphate
  modified_base 18: mod_base = OTHER; note = 2'-deoxy-2'-fluoroguanosine-3'-phosphate
  modified_base 19: mod_base = OTHER; note = 2'-O-methyluridine-3'-phosphate
  modified_base 20: mod_base = OTHER; note = 2'-deoxy-2'-fluorocytidine-3'-phosphate
  modified_base 21: mod_base = OTHER; note = 2'-O-methyluridine-3'-phosphorothioate
  modified_base 22: mod_base = OTHER; note = 2'-O-methylguanosine-3'-phosphorothioate
  modified_base 23: mod_base = OTHER; note = 2'-O-methylguanosine
tgtagatggtcttgtctgtctgg

SEQ ID NO: 360 - RNA, 23 nt, synthetic construct
  source 1..23: mol_type = other RNA
  modified_base 1: mod_base = OTHER; note = 2'-O-methylguanosine-3'-phosphorothioate
  modified_base 2: mod_base = OTHER; note = 2'-deoxy-2'-fluorouridine-3'-phosphorothioate
  modified_base 3: mod_base = OTHER; note = 2'-O-methylcytidine-3'-phosphate
  modified_base 4: mod_base = OTHER; note = 2'-deoxy-2'-fluorouridine-3'-phosphate
  modified_base 5: mod_base = OTHER; note = 2'-O-methyluridine-3'-phosphate
  modified_base 6: mod_base = OTHER; note = 2'-deoxy-2'-fluoroguanosine-3'-phosphate
  modified_base 7: mod_base = OTHER; note = 2'-O-methylguanosine-3'-phosphate
  modified_base 8: mod_base = OTHER; note = 2'-deoxy-2'-fluorouridine-3'-phosphate
  modified_base 9: mod_base = OTHER; note = 2'-O-methylguanosine-3'-phosphate
  modified_base 10: mod_base = OTHER; note = 2'-deoxy-2'-fluoroadenosine-3'-phosphate
  modified_base 11: mod_base = OTHER; note = 2'-O-methyladenosine-3'-phosphate
  modified_base 12: mod_base = OTHER; note = 2'-O-methylguanosine-3'-phosphate
  modified_base 13: mod_base = OTHER; note = 2'-O-methyluridine-3'-phosphate
  modified_base 14: mod_base = OTHER; note = 2'-deoxy-2'-fluoroguanosine-3'-phosphate
  modified_base 15: mod_base = OTHER; note = 2'-O-methylguanosine-3'-phosphate
  modified_base 16: mod_base = OTHER; note = 2'-deoxy-2'-fluoroadenosine-3'-phosphate
  modified_base 17: mod_base = OTHER; note = 2'-O-methyluridine-3'-phosphate
  modified_base 18: mod_base = OTHER; note = 2'-deoxy-2'-fluorocytidine-3'-phosphate
  modified_base 19: mod_base = OTHER; note = 2'-O-methyluridine-3'-phosphate
  modified_base 20: mod_base = OTHER; note = 2'-deoxy-2'-fluoroguanosine-3'-phosphate
  modified_base 21: mod_base = OTHER; note = 2'-O-methylguanosine-3'-phosphorothioate
  modified_base 22: mod_base = OTHER; note = 2'-O-methyluridine-3'-phosphorothioate
  modified_base 23: mod_base = OTHER; note = 2'-O-methyladenosine
gtcttggtgaagtggatctggta

SEQ ID NO: 361 - RNA, 23 nt, synthetic construct
  source 1..23: mol_type = other RNA
  modified_base 1: mod_base = OTHER; note = 2'-O-methyluridine-3'-phosphorothioate
  modified_base 2: mod_base = OTHER; note = 2'-deoxy-2'-fluoroguanosine-3'-phosphorothioate
  modified_base 3: mod_base = OTHER; note = 2'-O-methylguanosine-3'-phosphate
  modified_base 4: mod_base = OTHER; note = 2'-deoxy-2'-fluorouridine-3'-phosphate
  modified_base 5: mod_base = OTHER; note = 2'-O-methylcytidine-3'-phosphate
  modified_base 6: mod_base = OTHER; note = 2'-deoxy-2'-fluorouridine-3'-phosphate
  modified_base 7: mod_base = OTHER; note = 2'-O-methylguanosine-3'-phosphate
  modified_base 8: mod_base = OTHER; note = 2'-deoxy-2'-fluorocytidine-3'-phosphate
  modified_base 9: mod_base = OTHER; note = 2'-O-methylcytidine-3'-phosphate
  modified_base 10: mod_base = OTHER; note = 2'-deoxy-2'-fluoroadenosine-3'-phosphate
  modified_base 11: mod_base = OTHER; note = 2'-O-methylcytidine-3'-phosphate
  modified_base 12: mod_base = OTHER; note = 2'-O-methyladenosine-3'-phosphate
  modified_base 13: mod_base = OTHER; note = 2'-O-methylcytidine-3'-phosphate
  modified_base 14: mod_base = OTHER; note = 2'-deoxy-2'-fluoroadenosine-3'-phosphate
  modified_base 15: mod_base = OTHER; note = 2'-O-methylguanosine-3'-phosphate
  modified_base 16: mod_base = OTHER; note = 2'-deoxy-2'-fluoroadenosine-3'-phosphate
  modified_base 17: mod_base = OTHER; note = 2'-O-methyluridine-3'-phosphate
  modified_base 18: mod_base = OTHER; note = 2'-deoxy-2'-fluorocytidine-3'-phosphate
  modified_base 19: mod_base = OTHER; note = 2'-O-methylcytidine-3'-phosphate
  modified_base 20: mod_base = OTHER; note = 2'-deoxy-2'-fluorocytidine-3'-phosphate
  modified_base 21: mod_base = OTHER; note = 2'-O-methyluridine-3'-phosphorothioate
  modified_base 22: mod_base = OTHER; note = 2'-O-methyluridine-3'-phosphorothioate
  modified_base 23: mod_base = OTHER; note = 2'-O-methyluridine
tggtctgccacacagatcccttt

SEQ ID NO: 362 - RNA, 23 nt, synthetic construct
  source 1..23: mol_type = other RNA
  modified_base 1: mod_base = OTHER; note = 2'-O-methyladenosine-3'-phosphorothioate
  modified_base 2: mod_base = OTHER; note = 2'-deoxy-2'-fluoroguanosine-3'-phosphorothioate
  modified_base 3: mod_base = OTHER; note = 2'-O-methylguanosine-3'-phosphate
  modified_base 4: mod_base = OTHER; note = 2'-deoxy-2'-fluoroguanosine-3'-phosphate
  modified_base 5: mod_base = OTHER; note = 2'-O-methylguanosine-3'-phosphate
  modified_base 6: mod_base = OTHER; note = 2'-deoxy-2'-fluorouridine-3'-phosphate
  modified_base 7: mod_base = OTHER; note = 2'-O-methylguanosine-3'-phosphate
  modified_base 8: mod_base = OTHER; note = 2'-deoxy-2'-fluorouridine-3'-phosphate
  modified_base 9: mod_base = OTHER; note = 2'-O-methyladenosine-3'-phosphate
  modified_base 10: mod_base = OTHER; note = 2'-deoxy-2'-fluoroguanosine-3'-phosphate
  modified_base 11: mod_base = OTHER; note = 2'-O-methyladenosine-3'-phosphate
  modified_base 12: mod_base = OTHER; note = 2'-O-methyluridine-3'-phosphate
  modified_base 13: mod_base = OTHER; note = 2'-O-methylguanosine-3'-phosphate
  modified_base 14: mod_base = OTHER; note = 2'-deoxy-2'-fluoroguanosine-3'-phosphate
  modified_base 15: mod_base = OTHER; note = 2'-O-methyluridine-3'-phosphate
  modified_base 16: mod_base = OTHER; note = 2'-deoxy-2'-fluorocytidine-3'-phosphate
  modified_base 17: mod_base = OTHER; note = 2'-O-methyluridine-3'-phosphate
  modified_base 18: mod_base = OTHER; note = 2'-deoxy-2'-fluorouridine-3'-phosphate
  modified_base 19: mod_base = OTHER; note = 2'-O-methylguanosine-3'-phosphate
  modified_base 20: mod_base = OTHER; note = 2'-deoxy-2'-fluorouridine-3'-phosphate
  modified_base 21: mod_base = OTHER; note = 2'-O-methylcytidine-3'-phosphorothioate
  modified_base 22: mod_base = OTHER; note = 2'-O-methyluridine-3'-phosphorothioate
  modified_base 23: mod_base = OTHER; note = 2'-O-methylguanosine
aggggtgtagatggtcttgtctg

SEQ ID NO: 363 - RNA, 23 nt, synthetic construct
  source 1..23: mol_type = other RNA
  modified_base 1: mod_base = OTHER; note = 2'-O-methyluridine-3'-phosphorothioate
  modified_base 2: mod_base = OTHER; note = 2'-deoxy-2'-fluoroadenosine-3'-phosphorothioate
  modified_base 3: mod_base = OTHER; note = 2'-O-methyluridine-3'-phosphate
  modified_base 4: mod_base = OTHER; note = 2'-deoxy-2'-fluoroguanosine-3'-phosphate
  modified_base 5: mod_base = OTHER; note = 2'-O-methyladenosine-3'-phosphate
  modified_base 6: mod_base = OTHER; note = 2'-deoxy-2'-fluoroadenosine-3'-phosphate
  modified_base 7: mod_base = OTHER; note = 2'-O-methylguanosine-3'-phosphate
  modified_base 8: mod_base = OTHER; note = 2'-deoxy-2'-fluorocytidine-3'-phosphate
  modified_base 9: mod_base = OTHER; note = 2'-O-methyladenosine-3'-phosphate
  modified_base 10: mod_base = OTHER; note = 2'-deoxy-2'-fluoroadenosine-3'-phosphate
  modified_base 11: mod_base = OTHER; note = 2'-O-methyluridine-3'-phosphate
  modified_base 12: mod_base = OTHER; note = 2'-O-methyluridine-3'-phosphate
  modified_base 13: mod_base = OTHER; note = 2'-O-methylcytidine-3'-phosphate
  modified_base 14: mod_base = OTHER; note = 2'-deoxy-2'-fluorouridine-3'-phosphate
  modified_base 15: mod_base = OTHER; note = 2'-O-methylcytidine-3'-phosphate
  modified_base 16: mod_base = OTHER; note = 2'-deoxy-2'-fluorocytidine-3'-phosphate
  modified_base 17: mod_base = OTHER; note = 2'-O-methyluridine-3'-phosphate
  modified_base 18: mod_base = OTHER; note = 2'-deoxy-2'-fluorocytidine-3'-phosphate
  modified_base 19: mod_base = OTHER; note = 2'-O-methyladenosine-3'-phosphate
  modified_base 20: mod_base = OTHER; note = 2'-deoxy-2'-fluoroguanosine-3'-phosphate
  modified_base 21: mod_base = OTHER; note = 2'-O-methylcytidine-3'-phosphorothioate
  modified_base 22: mod_base = OTHER; note = 2'-O-methyladenosine-3'-phosphorothioate
  modified_base 23: mod_base = OTHER; note = 2'-O-methylcytidine
tatgaagcaattctcctcagcac

SEQ ID NO: 364 - RNA, 23 nt, synthetic construct
  source 1..23: mol_type = other RNA
  modified_base 1: mod_base = OTHER; note = 2'-O-methylguanosine-3'-phosphorothioate
  modified_base 2: mod_base = OTHER; note = 2'-deoxy-2'-fluoroadenosine-3'-phosphorothioate
  modified_base 3: mod_base = OTHER; note = 2'-O-methylguanosine-3'-phosphate
  modified_base 4: mod_base = OTHER; note = 2'-deoxy-2'-fluoroadenosine-3'-phosphate
  modified_base 5: mod_base = OTHER; note = 2'-O-methylguanosine-3'-phosphate
  modified_base 6: mod_base = OTHER; note = 2'-deoxy-2'-fluoroadenosine-3'-phosphate
  modified_base 7: mod_base = OTHER; note = 2'-O-methyladenosine-3'-phosphate
  modified_base 8: mod_base = OTHER; note = 2'-deoxy-2'-fluoroguanosine-3'-phosphate
  modified_base 9: mod_base = OTHER; note = 2'-O-methyladenosine-3'-phosphate
  modified_base 10: mod_base = OTHER; note = 2'-deoxy-2'-fluorocytidine-3'-phosphate
  modified_base 11: mod_base = OTHER; note = 2'-O-methylcytidine-3'-phosphate
  modified_base 12: mod_base = OTHER; note = 2'-O-methyluridine-3'-phosphate
  modified_base 13: mod_base = OTHER; note = 2'-O-methyluridine-3'-phosphate
  modified_base 14: mod_base = OTHER; note = 2'-deoxy-2'-fluoroguanosine-3'-phosphate
  modified_base 15: mod_base = OTHER; note = 2'-O-methyladenosine-3'-phosphate
  modified_base 16: mod_base = OTHER; note = 2'-deoxy-2'-fluorocytidine-3'-phosphate
  modified_base 17: mod_base = OTHER; note = 2'-O-methylcytidine-3'-phosphate
  modified_base 18: mod_base = OTHER; note = 2'-deoxy-2'-fluoroadenosine-3'-phosphate
  modified_base 19: mod_base = OTHER; note = 2'-O-methylcytidine-3'-phosphate
  modified_base 20: mod_base = OTHER; note = 2'-deoxy-2'-fluoroguanosine-3'-phosphate
  modified_base 21: mod_base = OTHER; note = 2'-O-methyluridine-3'-phosphorothioate
  modified_base 22: mod_base = OTHER; note = 2'-O-methyladenosine-3'-phosphorothioate
  modified_base 23: mod_base = OTHER; note = 2'-O-methylguanosine
gagagaagaccttgaccacgtag

SEQ ID NO: 365 - RNA, 23 nt, synthetic construct
  source 1..23: mol_type = other RNA
  modified_base 1: mod_base = OTHER; note = 2'-O-methyladenosine-3'-phosphorothioate
  modified_base 2: mod_base = OTHER; note = 2'-deoxy-2'-fluoroguanosine-3'-phosphorothioate
  modified_base 3: mod_base = OTHER; note = 2'-O-methylguanosine-3'-phosphate
  modified_base 4: mod_base = OTHER; note = 2'-deoxy-2'-fluoroguanosine-3'-phosphate
  modified_base 5: mod_base = OTHER; note = 2'-O-methylguanosine-3'-phosphate
  modified_base 6: mod_base = OTHER; note = 2'-deoxy-2'-fluorouridine-3'-phosphate
  modified_base 7: mod_base = OTHER; note = 2'-O-methylcytidine-3'-phosphate
  modified_base 8: mod_base = OTHER; note = 2'-deoxy-2'-fluorouridine-3'-phosphate
  modified_base 9: mod_base = OTHER; note = 2'-O-methylguanosine-3'-phosphate
  modified_base 10: mod_base = OTHER; note = 2'-deoxy-2'-fluorocytidine-3'-phosphate
  modified_base 11: mod_base = OTHER; note = 2'-O-methylcytidine-3'-phosphate
  modified_base 12: mod_base = OTHER; note = 2'-O-methyladenosine-3'-phosphate
  modified_base 13: mod_base = OTHER; note = 2'-O-methylcytidine-3'-phosphate
  modified_base 14: mod_base = OTHER; note = 2'-deoxy-2'-fluoroadenosine-3'-phosphate
  modified_base 15: mod_base = OTHER; note = 2'-O-methylcytidine-3'-phosphate
  modified_base 16: mod_base = OTHER; note = 2'-deoxy-2'-fluoroadenosine-3'-phosphate
  modified_base 17: mod_base = OTHER; note = 2'-O-methylguanosine-3'-phosphate
  modified_base 18: mod_base = OTHER; note = 2'-deoxy-2'-fluoroadenosine-3'-phosphate
  modified_base 19: mod_base = OTHER; note = 2'-O-methyluridine-3'-phosphate
  modified_base 20: mod_base = OTHER; note = 2'-deoxy-2'-fluorocytidine-3'-phosphate
  modified_base 21: mod_base = OTHER; note = 2'-O-methylcytidine-3'-phosphorothioate
  modified_base 22: mod_base = OTHER; note = 2'-O-methylcytidine-3'-phosphorothioate
  modified_base 23: mod_base = OTHER; note = 2'-O-methyluridine
aggggtctgccacacagatccct

SEQ ID NO: 366 - RNA, 23 nt, synthetic construct
  source 1..23: mol_type = other RNA
  modified_base 1: mod_base = OTHER; note = 2'-O-methyluridine-3'-phosphorothioate
  modified_base 2: mod_base = OTHER; note = 2'-deoxy-2'-fluoroguanosine-3'-phosphorothioate
  modified_base 3: mod_base = OTHER; note = 2'-O-methyluridine-3'-phosphate
  modified_base 4: mod_base = OTHER; note = 2'-deoxy-2'-fluoroguanosine-3'-phosphate
  modified_base 5: mod_base = OTHER; note = 2'-O-methyluridine-3'-phosphate
  modified_base 6: mod_base = OTHER; note = 2'-deoxy-2'-fluoroadenosine-3'-phosphate
  modified_base 7: mod_base = OTHER; note = 2'-O-methylguanosine-3'-phosphate
  modified_base 8: mod_base = OTHER; note = 2'-deoxy-2'-fluoroadenosine-3'-phosphate
  modified_base 9: mod_base = OTHER; note = 2'-O-methyluridine-3'-phosphate
  modified_base 10: mod_base = OTHER; note = 2'-deoxy-2'-fluoroguanosine-3'-phosphate
  modified_base 11: mod_base = OTHER; note = 2'-O-methylguanosine-3'-phosphate
  modified_base 12: mod_base = OTHER; note = 2'-O-methyluridine-3'-phosphate
  modified_base 13: mod_base = OTHER; note = 2'-O-methylcytidine-3'-phosphate
  modified_base 14: mod_base = OTHER; note = 2'-deoxy-2'-fluorouridine-3'-phosphate
  modified_base 15: mod_base = OTHER; note = 2'-O-methyluridine-3'-phosphate
  modified_base 16: mod_base = OTHER; note = 2'-deoxy-2'-fluoroguanosine-3'-phosphate
  modified_base 17: mod_base = OTHER; note = 2'-O-methyluridine-3'-phosphate
  modified_base 18: mod_base = OTHER; note = 2'-deoxy-2'-fluorocytidine-3'-phosphate
  modified_base 19: mod_base = OTHER; note = 2'-O-methyluridine-3'-phosphate
  modified_base 20: mod_base = OTHER; note = 2'-deoxy-2'-fluoroguanosine-3'-phosphate
  modified_base 21: mod_base = OTHER; note = 2'-O-methyluridine-3'-phosphorothioate
  modified_base 22: mod_base = OTHER; note = 2'-O-methylcytidine-3'-phosphorothioate
  modified_base 23: mod_base = OTHER; note = 2'-O-methyluridine
tgtgtagatggtcttgtctgtct

SEQ ID NO: 367 - RNA, 23 nt, synthetic construct
  source 1..23: mol_type = other RNA
  modified_base 1: mod_base = OTHER; note = 2'-O-methyladenosine-3'-phosphorothioate
  modified_base 2: mod_base = OTHER; note = 2'-deoxy-2'-fluoroadenosine-3'-phosphorothioate
  modified_base 3: mod_base = OTHER; note = 2'-O-methyluridine-3'-phosphate
  modified_base 4: mod_base = OTHER; note = 2'-deoxy-2'-fluoroguanosine-3'-phosphate
  modified_base 5: mod_base = OTHER; note = 2'-O-methylguanosine-3'-phosphate
  modified_base 6: mod_base = OTHER; note = 2'-deoxy-2'-fluorouridine-3'-phosphate
  modified_base 7: mod_base = OTHER; note = 2'-O-methylcytidine-3'-phosphate
  modified_base 8: mod_base = OTHER; note = 2'-deoxy-2'-fluorouridine-3'-phosphate
  modified_base 9: mod_base = OTHER; note = 2'-O-methyluridine-3'-phosphate
  modified_base 10: mod_base = OTHER; note = 2'-deoxy-2'-fluoroguanosine-3'-phosphate
  modified_base 11: mod_base = OTHER; note = 2'-O-methyluridine-3'-phosphate
  modified_base 12: mod_base = OTHER; note = 2'-O-methylcytidine-3'-phosphate
  modified_base 13: mod_base = OTHER; note = 2'-O-methyluridine-3'-phosphate
  modified_base 14: mod_base = OTHER; note = 2'-deoxy-2'-fluoroguanosine-3'-phosphate
  modified_base 15: mod_base = OTHER; note = 2'-O-methyluridine-3'-phosphate
  modified_base 16: mod_base = OTHER; note = 2'-deoxy-2'-fluorocytidine-3'-phosphate
  modified_base 17: mod_base = OTHER; note = 2'-O-methyluridine-3'-phosphate
  modified_base 18: mod_base = OTHER; note = 2'-deoxy-2'-fluoroguanosine-3'-phosphate
  modified_base 19: mod_base = OTHER; note = 2'-O-methylguanosine-3'-phosphate
  modified_base 20: mod_base = OTHER; note = 2'-deoxy-2'-fluoroadenosine-3'-phosphate
  modified_base 21: mod_base = OTHER; note = 2'-O-methyluridine-3'-phosphorothioate
  modified_base 22: mod_base = OTHER; note = 2'-O-methylguanosine-3'-phosphorothioate
  modified_base 23: mod_base = OTHER; note = 2'-O-methyladenosine
aatggtcttgtctgtctggatga

SEQ ID NO: 368 - RNA, 23 nt, synthetic construct
  source 1..23: mol_type = other RNA
  modified_base 1: mod_base = OTHER; note = 2'-O-methyluridine-3'-phosphorothioate
  modified_base 2: mod_base = OTHER; note = 2'-deoxy-2'-fluorouridine-3'-phosphorothioate
  modified_base 3: mod_base = OTHER; note = 2'-O-methylguanosine-3'-phosphate
  modified_base 4: mod_base = OTHER; note = 2'-deoxy-2'-fluoroadenosine-3'-phosphate
  modified_base 5: mod_base = OTHER; note = 2'-O-methylcytidine-3'-phosphate
  modified_base 6: mod_base = OTHER; note = 2'-deoxy-2'-fluoroguanosine-3'-phosphate
  modified_base 7: mod_base = OTHER; note = 2'-O-methyluridine-3'-phosphate
  modified_base 8: mod_base = OTHER; note = 2'-deoxy-2'-fluorocytidine-3'-phosphate
  modified_base 9: mod_base = OTHER; note = 2'-O-methylcytidine-3'-phosphate
  modified_base 10: mod_base = OTHER; note = 2'-deoxy-2'-fluoroadenosine-3'-phosphate
  modified_base 11: mod_base = OTHER; note = 2'-O-methylcytidine-3'-phosphate
  modified_base 12: mod_base = OTHER; note = 2'-O-methylcytidine-3'-phosphate
  modified_base 13: mod_base = OTHER; note = 2'-O-methylcytidine-3'-phosphate
  modified_base 14: mod_base = OTHER; note = 2'-deoxy-2'-fluoroadenosine-3'-phosphate
  modified_base 15: mod_base = OTHER; note = 2'-O-methylcytidine-3'-phosphate
  modified_base 16: mod_base = OTHER; note = 2'-deoxy-2'-fluoroadenosine-3'-phosphate
  modified_base 17: mod_base = OTHER; note = 2'-O-methylcytidine-3'-phosphate
  modified_base 18: mod_base = OTHER; note = 2'-deoxy-2'-fluoroguanosine-3'-phosphate
  modified_base 19: mod_base = OTHER; note = 2'-O-methylguanosine-3'-phosphate
  modified_base 20: mod_base = OTHER; note = 2'-deoxy-2'-fluoroadenosine-3'-phosphate
  modified_base 21: mod_base = OTHER; note = 2'-O-methylguanosine-3'-phosphorothioate
  modified_base 22: mod_base = OTHER; note = 2'-O-methyluridine-3'-phosphorothioate
  modified_base 23: mod_base = OTHER; note = 2'-O-methylcytidine
ttgacgtccacccacacggagtc

SEQ ID NO: 369 - RNA, 23 nt, synthetic construct
  source 1..23: mol_type = other RNA
  modified_base 1: mod_base = OTHER; note = 2'-O-methyladenosine-3'-phosphorothioate
  modified_base 2: mod_base = OTHER; note = 2'-deoxy-2'-fluoroguanosine-3'-phosphorothioate
  modified_base 3: mod_base = OTHER; note = 2'-O-methyladenosine-3'-phosphate
  modified_base 4: mod_base = OTHER; note = 2'-deoxy-2'-fluorouridine-3'-phosphate
  modified_base 5: mod_base = OTHER; note = 2'-O-methylguanosine-3'-phosphate
  modified_base 6: mod_base = OTHER; note = 2'-deoxy-2'-fluoroguanosine-3'-phosphate
  modified_base 7: mod_base = OTHER; note = 2'-O-methyluridine-3'-phosphate
  modified_base 8: mod_base = OTHER; note = 2'-deoxy-2'-fluorocytidine-3'-phosphate
  modified_base 9: mod_base = OTHER; note = 2'-O-methyluridine-3'-phosphate
  modified_base 10: mod_base = OTHER; note = 2'-deoxy-2'-fluorouridine-3'-phosphate
  modified_base 11: mod_base = OTHER; note = 2'-O-methylguanosine-3'-phosphate
  modified_base 12: mod_base = OTHER; note = 2'-O-methyluridine-3'-phosphate
  modified_base 13: mod_base = OTHER; note = 2'-O-methylcytidine-3'-phosphate
  modified_base 14: mod_base = OTHER; note = 2'-deoxy-2'-fluorouridine-3'-phosphate
  modified_base 15: mod_base = OTHER; note = 2'-O-methylguanosine-3'-phosphate
  modified_base 16: mod_base = OTHER; note = 2'-deoxy-2'-fluorouridine-3'-phosphate
  modified_base 17: mod_base = OTHER; note = 2'-O-methylcytidine-3'-phosphate
  modified_base 18: mod_base = OTHER; note = 2'-deoxy-2'-fluorouridine-3'-phosphate
  modified_base 19: mod_base = OTHER; note = 2'-O-methylguanosine-3'-phosphate
  modified_base 20: mod_base = OTHER; note = 2'-deoxy-2'-fluoroguanosine-3'-phosphate
  modified_base 21: mod_base = OTHER; note = 2'-O-methyladenosine-3'-phosphorothioate
  modified_base 22: mod_base = OTHER; note = 2'-O-methyluridine-3'-phosphorothioate
  modified_base 23: mod_base = OTHER; note = 2'-O-methylguanosine
agatggtcttgtctgtctggatg

SEQ ID NO: 370 - RNA, 23 nt, synthetic construct
  source 1..23: mol_type = other RNA
  modified_base 1: mod_base = OTHER; note = 2'-O-methylguanosine-3'-phosphorothioate
  modified_base 2: mod_base = OTHER; note = 2'-deoxy-2'-fluoroguanosine-3'-phosphorothioate
  modified_base 3: mod_base = OTHER; note = 2'-O-methylguanosine-3'-phosphate
  modified_base 4: mod_base = OTHER; note = 2'-deoxy-2'-fluorouridine-3'-phosphate
  modified_base 5: mod_base = OTHER; note = 2'-O-methylcytidine-3'-phosphate
  modified_base 6: mod_base = OTHER; note = 2'-deoxy-2'-fluorouridine-3'-phosphate
  modified_base 7: mod_base = OTHER; note = 2'-O-methylguanosine-3'-phosphate
  modified_base 8: mod_base = OTHER; note = 2'-deoxy-2'-fluorocytidine-3'-phosphate
  modified_base 9: mod_base = OTHER; note = 2'-O-methylcytidine-3'-phosphate
  modified_base 10: mod_base = OTHER; note = 2'-deoxy-2'-fluoroadenosine-3'-phosphate
  modified_base 11: mod_base = OTHER; note = 2'-O-methylcytidine-3'-phosphate
  modified_base 12: mod_base = OTHER; note = 2'-O-methyladenosine-3'-phosphate
  modified_base 13: mod_base = OTHER; note = 2'-O-methylcytidine-3'-phosphate
  modified_base 14: mod_base = OTHER; note = 2'-deoxy-2'-fluoroadenosine-3'-phosphate
  modified_base 15: mod_base = OTHER; note = 2'-O-methylguanosine-3'-phosphate
  modified_base 16: mod_base = OTHER; note = 2'-deoxy-2'-fluoroadenosine-3'-phosphate
  modified_base 17: mod_base = OTHER; note = 2'-O-methyluridine-3'-phosphate
  modified_base 18: mod_base = OTHER; note = 2'-deoxy-2'-fluorocytidine-3'-phosphate
  modified_base 19: mod_base = OTHER; note = 2'-O-methylcytidine-3'-phosphate
  modified_base 20: mod_base = OTHER; note = 2'-deoxy-2'-fluorocytidine-3'-phosphate
  modified_base 21: mod_base = OTHER; note = 2'-O-methyluridine-3'-phosphorothioate
  modified_base 22: mod_base = OTHER; note = 2'-O-methyluridine-3'-phosphorothioate
  modified_base 23: mod_base = OTHER; note = 2'-O-methyluridine
gggtctgccacacagatcccttt

SEQ ID NO: 371 - RNA, 23 nt, synthetic construct
  source 1..23: mol_type = other RNA
  modified_base 1: mod_base = OTHER; note = 2'-O-methyluridine-3'-phosphorothioate
  modified_base 2: mod_base = OTHER; note = 2'-deoxy-2'-fluorocytidine-3'-phosphorothioate
  modified_base 3: mod_base = OTHER; note = 2'-O-methylcytidine-3'-phosphate
  modified_base 4: mod_base = OTHER; note = 2'-deoxy-2'-fluoroadenosine-3'-phosphate
  modified_base 5: mod_base = OTHER; note = 2'-O-methylcytidine-3'-phosphate
  modified_base 6: mod_base = OTHER; note = 2'-deoxy-2'-fluoroadenosine-3'-phosphate
  modified_base 7: mod_base = OTHER; note = 2'-O-methylcytidine-3'-phosphate
  modified_base 8: mod_base = OTHER; note = 2'-deoxy-2'-fluoroadenosine-3'-phosphate
  modified_base 9: mod_base = OTHER; note = 2'-O-methylguanosine-3'-phosphate
  modified_base 10: mod_base = OTHER; note = 2'-deoxy-2'-fluoroadenosine-3'-phosphate
  modified_base 11: mod_base = OTHER; note = 2'-O-methyluridine-3'-phosphate
  modified_base 12: mod_base = OTHER; note = 2'-O-methylcytidine-3'-phosphate
  modified_base 13: mod_base = OTHER; note = 2'-O-methylcytidine-3'-phosphate
  modified_base 14: mod_base = OTHER; note = 2'-deoxy-2'-fluorocytidine-3'-phosphate
  modified_base 15: mod_base = OTHER; note = 2'-O-methyluridine-3'-phosphate
  modified_base 16: mod_base = OTHER; note = 2'-deoxy-2'-fluorouridine-3'-phosphate
  modified_base 17: mod_base = OTHER; note = 2'-O-methyluridine-3'-phosphate
  modified_base 18: mod_base = OTHER; note = 2'-deoxy-2'-fluorocytidine-3'-phosphate
  modified_base 19: mod_base = OTHER; note = 2'-O-methyluridine-3'-phosphate
  modified_base 20: mod_base = OTHER; note = 2'-deoxy-2'-fluorouridine-3'-phosphate
  modified_base 21: mod_base = OTHER; note = 2'-O-methylguanosine-3'-phosphorothioate
  modified_base 22: mod_base = OTHER; note = 2'-O-methyluridine-3'-phosphorothioate
  modified_base 23: mod_base = OTHER; note = 2'-O-methylcytidine
tccacacagatccctttcttgtc

SEQ ID NO: 372 - RNA, 23 nt, synthetic construct
  source 1..23: mol_type = other RNA
  modified_base 1: mod_base = OTHER; note = 2'-O-methyladenosine-3'-phosphorothioate
  modified_base 2: mod_base = OTHER; note = 2'-deoxy-2'-fluorouridine-3'-phosphorothioate
  modified_base 3: mod_base = OTHER; note = 2'-O-methylcytidine-3'-phosphate
  modified_base 4: mod_base = OTHER; note = 2'-deoxy-2'-fluoroadenosine-3'-phosphate
  modified_base 5: mod_base = OTHER; note = 2'-O-methylcytidine-3'-phosphate
  modified_base 6: mod_base = OTHER; note = 2'-deoxy-2'-fluoroguanosine-3'-phosphate
  modified_base 7: mod_base = OTHER; note = 2'-O-methyladenosine-3'-phosphate
  modified_base 8: mod_base = OTHER; note = 2'-deoxy-2'-fluoroadenosine-3'-phosphate
  modified_base 9: mod_base = OTHER; note = 2'-O-methylcytidine-3'-phosphate
  modified_base 10: mod_base = OTHER; note = 2'-deoxy-2'-fluoroadenosine-3'-phosphate
  modified_base 11: mod_base = OTHER; note = 2'-O-methylcytidine-3'-phosphate
  modified_base 12: mod_base = OTHER; note = 2'-O-methylcytidine-3'-phosphate
  modified_base 13: mod_base = OTHER; note = 2'-O-methyladenosine-3'-phosphate
  modified_base 14: mod_base = OTHER; note = 2'-deoxy-2'-fluorouridine-3'-phosphate
  modified_base 15: mod_base = OTHER; note = 2'-O-methylguanosine-3'-phosphate
  modified_base 16: mod_base = OTHER; note = 2'-deoxy-2'-fluoroadenosine-3'-phosphate
  modified_base 17: mod_base = OTHER; note = 2'-O-methylguanosine-3'-phosphate
  modified_base 18: mod_base = OTHER; note = 2'-deoxy-2'-fluoroguanosine-3'-phosphate
  modified_base 19: mod_base = OTHER; note = 2'-O-methyluridine-3'-phosphate
  modified_base 20: mod_base = OTHER; note = 2'-deoxy-2'-fluorocytidine-3'-phosphate
  modified_base 21: mod_base = OTHER; note = 2'-O-methyladenosine-3'-phosphorothioate
  modified_base 22: mod_base = OTHER; note = 2'-O-methyladenosine-3'-phosphorothioate
  modified_base 23: mod_base = OTHER; note = 2'-O-methyladenosine
atcacgaacaccatgaggtcaaa

SEQ ID NO: 373 - RNA, 23 nt, synthetic construct
  source 1..23: mol_type = other RNA
  modified_base 1: mod_base = OTHER; note = 2'-O-methyladenosine-3'-phosphorothioate
  modified_base 2: mod_base = OTHER; note = 2'-deoxy-2'-fluoroadenosine-3'-phosphorothioate
  modified_base 3: mod_base = OTHER; note = 2'-O-methylguanosine-3'-phosphate
  modified_base 4: mod_base = OTHER; note = 2'-deoxy-2'-fluorouridine-3'-phosphate
  modified_base 5: mod_base = OTHER; note = 2'-O-methylcytidine-3'-phosphate
  modified_base 6: mod_base = OTHER; note = 2'-deoxy-2'-fluoroadenosine-3'-phosphate
  modified_base 7: mod_base = OTHER; note = 2'-O-methyladenosine-3'-phosphate
  modified_base 8: mod_base = OTHER; note = 2'-deoxy-2'-fluoroadenosine-3'-phosphate
  modified_base 9: mod_base = OTHER; note = 2'-O-methylguanosine-3'-phosphate
  modified_base 10: mod_base = OTHER; note = 2'-deoxy-2'-fluorouridine-3'-phosphate
  modified_base 11: mod_base = OTHER; note = 2'-O-methylcytidine-3'-phosphate
  modified_base 12: mod_base = OTHER; note = 2'-O-methyluridine-3'-phosphate
  modified_base 13: mod_base = OTHER; note = 2'-O-methyluridine-3'-phosphate
  modified_base 14: mod_base = OTHER; note = 2'-deoxy-2'-fluorouridine-3'-phosphate
  modified_base 15: mod_base = OTHER; note = 2'-O-methyluridine-3'-phosphate
  modified_base 16: mod_base = OTHER; note = 2'-deoxy-2'-fluoroadenosine-3'-phosphate
  modified_base 17: mod_base = OTHER; note = 2'-O-methylguanosine-3'-phosphate
  modified_base 18: mod_base = OTHER; note = 2'-deoxy-2'-fluorocytidine-3'-phosphate
  modified_base 19: mod_base = OTHER; note = 2'-O-methyluridine-3'-phosphate
  modified_base 20: mod_base = OTHER; note = 2'-deoxy-2'-fluoroguanosine-3'-phosphate
  modified_base 21: mod_base = OTHER; note = 2'-O-methylcytidine-3'-phosphorothioate
  modified_base 22: mod_base = OTHER; note = 2'-O-methyladenosine-3'-phosphorothioate
  modified_base 23: mod_base = OTHER; note = 2'-O-methylguanosine
aagtcaaagtcttttagctgcag

SEQ ID NO: 374 - RNA, 23 nt, synthetic construct
  source 1..23: mol_type = other RNA
  modified_base 1: mod_base = OTHER; note = 2'-O-methyladenosine-3'-phosphorothioate
  modified_base 2: mod_base = OTHER; note = 2'-deoxy-2'-fluorouridine-3'-phosphorothioate
  modified_base 3: mod_base = OTHER; note = 2'-O-methylguanosine-3'-phosphate
  modified_base 4: mod_base = OTHER; note = 2'-deoxy-2'-fluoroguanosine-3'-phosphate
  modified_base 5: mod_base = OTHER; note = 2'-O-methyluridine-3'-phosphate
  modified_base 6: mod_base = OTHER; note = 2'-deoxy-2'-fluorocytidine-3'-phosphate
  modified_base 7: mod_base = OTHER; note = 2'-O-methyluridine-3'-phosphate
  modified_base 8: mod_base = OTHER; note = 2'-deoxy-2'-fluorouridine-3'-phosphate
  modified_base 9: mod_base = OTHER; note = 2'-O-methylguanosine-3'-phosphate
  modified_base 10: mod_base = OTHER; note = 2'-deoxy-2'-fluorouridine-3'-phosphate
  modified_base 11: mod_base = OTHER; note = 2'-O-methylcytidine-3'-phosphate
  modified_base 12: mod_base = OTHER; note = 2'-O-methyluridine-3'-phosphate
  modified_base 13: mod_base = OTHER; note = 2'-O-methylguanosine-3'-phosphate
  modified_base 14: mod_base = OTHER; note = 2'-deoxy-2'-fluorouridine-3'-phosphate
  modified_base 15: mod_base = OTHER; note = 2'-O-methylcytidine-3'-phosphate
  modified_base 16: mod_base = OTHER; note = 2'-deoxy-2'-fluorouridine-3'-phosphate
  modified_base 17: mod_base = OTHER; note = 2'-O-methylguanosine-3'-phosphate
  modified_base 18: mod_base = OTHER; note = 2'-deoxy-2'-fluoroguanosine-3'-phosphate
  modified_base 19: mod_base = OTHER; note = 2'-O-methyladenosine-3'-phosphate
  modified_base 20: mod_base = OTHER; note = 2'-deoxy-2'-fluorouridine-3'-phosphate
  modified_base 21: mod_base = OTHER; note = 2'-O-methylguanosine-3'-phosphorothioate
  modified_base 22: mod_base = OTHER; note = 2'-O-methyladenosine-3'-phosphorothioate
  modified_base 23: mod_base = OTHER; note = 2'-O-methyladenosine
atggtcttgtctgtctggatgaa

SEQ ID NO: 375 - RNA, 23 nt, synthetic construct
  source 1..23: mol_type = other RNA
  modified_base 1: mod_base = OTHER; note = 2'-O-methylguanosine-3'-phosphorothioate
  modified_base 2: mod_base = OTHER; note = 2'-deoxy-2'-fluoroguanosine-3'-phosphorothioate
  modified_base 3: mod_base = OTHER; note = 2'-O-methyluridine-3'-phosphate
  modified_base 4: mod_base = OTHER; note = 2'-deoxy-2'-fluoroguanosine-3'-phosphate
  modified_base 5: mod_base = OTHER; note = 2'-O-methyluridine-3'-phosphate
  modified_base 6: mod_base = OTHER; note = 2'-deoxy-2'-fluoroadenosine-3'-phosphate
  modified_base 7: mod_base = OTHER; note = 2'-O-methylguanosine-3'-phosphate
  modified_base 8: mod_base = OTHER; note = 2'-deoxy-2'-fluoroadenosine-3'-phosphate
  modified_base 9: mod_base = OTHER; note = 2'-O-methyluridine-3'-phosphate
  modified_base 10: mod_base = OTHER; note = 2'-deoxy-2'-fluoroguanosine-3'-phosphate
  modified_base 11: mod_base = OTHER; note = 2'-O-methylguanosine-3'-phosphate
  modified_base 12: mod_base = OTHER; note = 2'-O-methyluridine-3'-phosphate
  modified_base 13: mod_base = OTHER; note = 2'-O-methylcytidine-3'-phosphate
  modified_base 14: mod_base = OTHER; note = 2'-deoxy-2'-fluorouridine-3'-phosphate
  modified_base 15: mod_base = OTHER; note = 2'-O-methyluridine-3'-phosphate
  modified_base 16: mod_base = OTHER; note = 2'-deoxy-2'-fluoroguanosine-3'-phosphate
  modified_base 17: mod_base = OTHER; note = 2'-O-methyluridine-3'-phosphate
  modified_base 18: mod_base = OTHER; note = 2'-deoxy-2'-fluorocytidine-3'-phosphate
  modified_base 19: mod_base = OTHER; note = 2'-O-methyluridine-3'-phosphate
  modified_base 20: mod_base = OTHER; note = 2'-deoxy-2'-fluoroguanosine-3'-phosphate
  modified_base 21: mod_base = OTHER; note = 2'-O-methyluridine-3'-phosphorothioate
  modified_base 22: mod_base = OTHER; note = 2'-O-methylcytidine-3'-phosphorothioate
  modified_base 23: mod_base = OTHER; note = 2'-O-methyluridine
ggtgtagatggtcttgtctgtct

SEQ ID NO: 376 - RNA, 23 nt, synthetic construct
  source 1..23: mol_type = other RNA
  modified_base 1: mod_base = OTHER; note = 2'-O-methylguanosine-3'-phosphorothioate
  modified_base 2: mod_base = OTHER; note = 2'-deoxy-2'-fluoroadenosine-3'-phosphorothioate
  modified_base 3: mod_base = OTHER; note = 2'-O-methyluridine-3'-phosphate
  modified_base 4: mod_base = OTHER; note = 2'-deoxy-2'-fluoroguanosine-3'-phosphate
  modified_base 5: mod_base = OTHER; note = 2'-O-methylguanosine-3'-phosphate
  modified_base 6: mod_base = OTHER; note = 2'-deoxy-2'-fluorouridine-3'-phosphate
  modified_base 7: mod_base = OTHER; note = 2'-O-methylcytidine-3'-phosphate
  modified_base 8: mod_base = OTHER; note = 2'-deoxy-2'-fluorouridine-3'-phosphate
  modified_base 9: mod_base = OTHER; note = 2'-O-methyluridine-3'-phosphate
  modified_base 10: mod_base = OTHER; note = 2'-deoxy-2'-fluoroguanosine-3'-phosphate
  modified_base 11: mod_base = OTHER; note = 2'-O-methyluridine-3'-phosphate
  modified_base 12: mod_base = OTHER; note = 2'-O-methylcytidine-3'-phosphate
  modified_base 13: mod_base = OTHER; note = 2'-O-methyluridine-3'-phosphate
  modified_base 14: mod_base = OTHER; note = 2'-deoxy-2'-fluoroguanosine-3'-phosphate
  modified_base 15: mod_base = OTHER; note = 2'-O-methyluridine-3'-phosphate
  modified_base 16: mod_base = OTHER; note = 2'-deoxy-2'-fluorocytidine-3'-phosphate
  modified_base 17: mod_base = OTHER; note = 2'-O-methyluridine-3'-phosphate
  modified_base 18: mod_base = OTHER; note = 2'-deoxy-2'-fluoroguanosine-3'-phosphate
  modified_base 19: mod_base = OTHER; note = 2'-O-methylguanosine-3'-phosphate
  modified_base 20: mod_base = OTHER; note = 2'-deoxy-2'-fluoroadenosine-3'-phosphate
  modified_base 21: mod_base = OTHER; note = 2'-O-methyluridine-3'-phosphorothioate
  modified_base 22: mod_base = OTHER; note = 2'-O-methylguanosine-3'-phosphorothioate
  modified_base 23: mod_base = OTHER; note = 2'-O-methyladenosine
gatggtcttgtctgtctggatga

SEQ ID NO: 377 - RNA, 23 nt, synthetic construct
  source 1..23: mol_type = other RNA
  modified_base 1: mod_base = OTHER; note = 2'-O-methyladenosine-3'-phosphorothioate
  modified_base 2: mod_base = OTHER; note = 2'-deoxy-2'-fluoroadenosine-3'-phosphorothioate
  modified_base 3: mod_base = OTHER; note = 2'-O-methylcytidine-3'-phosphate
  modified_base 4: mod_base = OTHER; note = 2'-deoxy-2'-fluoroguanosine-3'-phosphate
  modified_base 5: mod_base = OTHER; note = 2'-O-methyladenosine-3'-phosphate
  modified_base 6: mod_base = OTHER; note = 2'-deoxy-2'-fluoroadenosine-3'-phosphate
  modified_base 7: mod_base = OTHER; note = 2'-O-methylcytidine-3'-phosphate
  modified_base 8: mod_base = OTHER; note = 2'-deoxy-2'-fluoroadenosine-3'-phosphate
  modified_base 9: mod_base = OTHER; note = 2'-O-methylcytidine-3'-phosphate
  modified_base 10: mod_base = OTHER; note = 2'-deoxy-2'-fluorocytidine-3'-phosphate
  modified_base 11: mod_base = OTHER; note = 2'-O-methyladenosine-3'-phosphate
  modified_base 12: mod_base = OTHER; note = 2'-O-methyluridine-3'-phosphate
  modified_base 13: mod_base = OTHER; note = 2'-O-methylguanosine-3'-phosphate
  modified_base 14: mod_base = OTHER; note = 2'-deoxy-2'-fluoroadenosine-3'-phosphate
  modified_base 15: mod_base = OTHER; note = 2'-O-methylguanosine-3'-phosphate
  modified_base 16: mod_base = OTHER; note = 2'-deoxy-2'-fluoroguanosine-3'-phosphate
  modified_base 17: mod_base = OTHER; note = 2'-O-methyluridine-3'-phosphate
  modified_base 18: mod_base = OTHER; note = 2'-deoxy-2'-fluorocytidine-3'-phosphate
  modified_base 19: mod_base = OTHER; note = 2'-O-methyladenosine-3'-phosphate
  modified_base 20: mod_base = OTHER; note = 2'-deoxy-2'-fluoroadenosine-3'-phosphate
  modified_base 21: mod_base = OTHER; note = 2'-O-methyladenosine-3'-phosphorothioate
  modified_base 22: mod_base = OTHER; note = 2'-O-methylguanosine-3'-phosphorothioate
  modified_base 23: mod_base = OTHER; note = 2'-O-methylguanosine
aacgaacaccatgaggtcaaagg

SEQ ID NO: 378 - RNA, 23 nt, synthetic construct
  source 1..23: mol_type = other RNA
  modified_base 1: mod_base = OTHER; note = 2'-O-methyladenosine-3'-phosphorothioate
  modified_base 2: mod_base = OTHER; note = 2'-deoxy-2'-fluorouridine-3'-phosphorothioate
  modified_base 3: mod_base = OTHER; note = 2'-O-methylcytidine-3'-phosphate
  modified_base 4: mod_base = OTHER; note = 2'-deoxy-2'-fluoroadenosine-3'-phosphate
  modified_base 5: mod_base = OTHER; note = 2'-O-methyluridine-3'-phosphate
  modified_base 6: mod_base = OTHER; note = 2'-deoxy-2'-fluoroadenosine-3'-phosphate
  modified_base 7: mod_base = OTHER; note = 2'-O-methylguanosine-3'-phosphate
  modified_base 8: mod_base = OTHER; note = 2'-deoxy-2'-fluorouridine-3'-phosphate
  modified_base 9: mod_base = OTHER; note = 2'-O-methylguanosine-3'-phosphate
  modified_base 10: mod_base = OTHER; note = 2'-deoxy-2'-fluorouridine-3'-phosphate
  modified_base 11: mod_base = OTHER; note = 2'-O-methyluridine-3'-phosphate
  modified_base 12: mod_base = OTHER; note = 2'-O-methylcytidine-3'-phosphate
  modified_base 13: mod_base = OTHER; note = 2'-O-methyluridine-3'-phosphate
  modified_base 14: mod_base = OTHER; note = 2'-deoxy-2'-fluorouridine-3'-phosphate
  modified_base 15: mod_base = OTHER; note = 2'-O-methylguanosine-3'-phosphate
  modified_base 16: mod_base = OTHER; note = 2'-deoxy-2'-fluoroguanosine-3'-phosphate
  modified_base 17: mod_base = OTHER; note = 2'-O-methylcytidine-3'-phosphate
  modified_base 18: mod_base = OTHER; note = 2'-deoxy-2'-fluoroadenosine-3'-phosphate
  modified_base 19: mod_base = OTHER; note = 2'-O-methyluridine-3'-phosphate
  modified_base 20: mod_base = OTHER; note = 2'-deoxy-2'-fluorocytidine-3'-phosphate
  modified_base 21: mod_base = OTHER; note = 2'-O-methylcytidine-3'-phosphorothioate
  modified_base 22: mod_base = OTHER; note = 2'-O-methyluridine-3'-phosphorothioate
  modified_base 23: mod_base = OTHER; note = 2'-O-methylguanosine
atcatagtgttcttggcatcctg

SEQ ID NO: 379 - RNA, 23 nt, synthetic construct
  source 1..23: mol_type = other RNA
  modified_base 1: mod_base = OTHER; note = 2'-O-methyluridine-3'-phosphorothioate
  modified_base 2: mod_base = OTHER; note = 2'-deoxy-2'-fluoroguanosine-3'-phosphorothioate
  modified_base 3: mod_base = OTHER; note = 2'-O-methylcytidine-3'-phosphate
  modified_base 4: mod_base = OTHER; note = 2'-deoxy-2'-fluorocytidine-3'-phosphate
  modified_base 5: mod_base = OTHER; note = 2'-O-methyladenosine-3'-phosphate
  modified_base 6: mod_base = OTHER; note = 2'-deoxy-2'-fluorocytidine-3'-phosphate
  modified_base 7: mod_base = OTHER; note = 2'-O-methyladenosine-3'-phosphate
  modified_base 8: mod_base = OTHER; note = 2'-deoxy-2'-fluorocytidine-3'-phosphate
  modified_base 9: mod_base = OTHER; note = 2'-O-methyladenosine-3'-phosphate
  modified_base 10: mod_base = OTHER; note = 2'-deoxy-2'-fluoroguanosine-3'-phosphate
  modified_base 11: mod_base = OTHER; note = 2'-O-methyladenosine-3'-phosphate
  modified_base 12: mod_base = OTHER; note = 2'-O-methyluridine-3'-phosphate
  modified_base 13: mod_base = OTHER; note = 2'-O-methylcytidine-3'-phosphate
  modified_base 14: mod_base = OTHER; note = 2'-deoxy-2'-fluorocytidine-3'-phosphate
  modified_base 15: mod_base = OTHER; note = 2'-O-methylcytidine-3'-phosphate
  modified_base 16: mod_base = OTHER; note = 2'-deoxy-2'-fluorouridine-3'-phosphate
  modified_base 17: mod_base = OTHER; note = 2'-O-methyluridine-3'-phosphate
  modified_base 18: mod_base = OTHER; note = 2'-deoxy-2'-fluorouridine-3'-phosphate
  modified_base 19: mod_base = OTHER; note = 2'-O-methylcytidine-3'-phosphate
  modified_base 20: mod_base = OTHER; note = 2'-deoxy-2'-fluorouridine-3'-phosphate
  modified_base 21: mod_base = OTHER; note = 2'-O-methyluridine-3'-phosphorothioate
  modified_base 22: mod_base = OTHER; note = 2'-O-methylguanosine-3'-phosphorothioate
  modified_base 23: mod_base = OTHER; note = 2'-O-methyluridine
tgccacacagatccctttcttgt

SEQ ID NO: 380 - RNA, 23 nt, synthetic construct
  source 1..23: mol_type = other RNA
  modified_base 1: mod_base = OTHER; note = 2'-O-methylguanosine-3'-phosphorothioate
  modified_base 2: mod_base = OTHER; note = 2'-deoxy-2'-fluorocytidine-3'-phosphorothioate
  modified_base 3: mod_base = OTHER; note = 2'-O-methylcytidine-3'-phosphate
  modified_base 4: mod_base = OTHER; note = 2'-deoxy-2'-fluoroadenosine-3'-phosphate
  modified_base 5: mod_base = OTHER; note = 2'-O-methylcytidine-3'-phosphate
  modified_base 6: mod_base = OTHER; note = 2'-deoxy-2'-fluoroadenosine-3'-phosphate
  modified_base 7: mod_base = OTHER; note = 2'-O-methylcytidine-3'-phosphate
  modified_base 8: mod_base = OTHER; note = 2'-deoxy-2'-fluoroadenosine-3'-phosphate
  modified_base 9: mod_base = OTHER; note = 2'-O-methylguanosine-3'-phosphate
  modified_base 10: mod_base = OTHER; note = 2'-deoxy-2'-fluoroadenosine-3'-phosphate
  modified_base 11: mod_base = OTHER; note = 2'-O-methyluridine-3'-phosphate
  modified_base 12: mod_base = OTHER; note = 2'-O-methylcytidine-3'-phosphate
  modified_base 13: mod_base = OTHER; note = 2'-O-methylcytidine-3'-phosphate
  modified_base 14: mod_base = OTHER; note = 2'-deoxy-2'-fluorocytidine-3'-phosphate
  modified_base 15: mod_base = OTHER; note = 2'-O-methyluridine-3'-phosphate
  modified_base 16: mod_base = OTHER; note = 2'-deoxy-2'-fluorouridine-3'-phosphate
  modified_base 17: mod_base = OTHER; note = 2'-O-methyluridine-3'-phosphate
  modified_base 18: mod_base = OTHER; note = 2'-deoxy-2'-fluorocytidine-3'-phosphate
  modified_base 19: mod_base = OTHER; note = 2'-O-methyluridine-3'-phosphate
  modified_base 20: mod_base = OTHER; note = 2'-deoxy-2'-fluorouridine-3'-phosphate
  modified_base 21: mod_base = OTHER; note = 2'-O-methylguanosine-3'-phosphorothioate
  modified_base 22: mod_base = OTHER; note = 2'-O-methyluridine-3'-phosphorothioate
  modified_base 23: mod_base = OTHER; note = 2'-O-methylcytidine
gccacacagatccctttcttgtc

SEQ ID NO: 381 - RNA, 23 nt, synthetic construct
  source 1..23: mol_type = other RNA
  modified_base 1: mod_base = OTHER; note = 2'-O-methyladenosine-3'-phosphorothioate
  modified_base 2: mod_base = OTHER; note = 2'-deoxy-2'-fluoroguanosine-3'-phosphorothioate
  modified_base 3: mod_base = OTHER; note = 2'-O-methyladenosine-3'-phosphate
  modified_base 4: mod_base = OTHER; note = 2'-deoxy-2'-fluoroguanosine-3'-phosphate
  modified_base 5: mod_base = OTHER; note = 2'-O-methyladenosine-3'-phosphate
  modified_base 6: mod_base = OTHER; note = 2'-deoxy-2'-fluoroadenosine-3'-phosphate
  modified_base 7: mod_base = OTHER; note = 2'-O-methylguanosine-3'-phosphate
  modified_base 8: mod_base = OTHER; note = 2'-deoxy-2'-fluoroadenosine-3'-phosphate
  modified_base 9: mod_base = OTHER; note = 2'-O-methylcytidine-3'-phosphate
  modified_base 10: mod_base = OTHER; note = 2'-deoxy-2'-fluorocytidine-3'-phosphate
  modified_base 11: mod_base = OTHER; note = 2'-O-methyluridine-3'-phosphate
  modified_base 12: mod_base = OTHER; note = 2'-O-methyluridine-3'-phosphate
  modified_base 13: mod_base = OTHER; note = 2'-O-methylguanosine-3'-phosphate
  modified_base 14: mod_base = OTHER; note = 2'-deoxy-2'-fluoroadenosine-3'-phosphate
  modified_base 15: mod_base = OTHER; note = 2'-O-methylcytidine-3'-phosphate
  modified_base 16: mod_base = OTHER; note = 2'-deoxy-2'-fluorocytidine-3'-phosphate
  modified_base 17: mod_base = OTHER; note = 2'-O-methyladenosine-3'-phosphate
  modified_base 18: mod_base = OTHER; note = 2'-deoxy-2'-fluorocytidine-3'-phosphate
  modified_base 19: mod_base = OTHER; note = 2'-O-methylguanosine-3'-phosphate
  modified_base 20: mod_base = OTHER; note = 2'-deoxy-2'-fluorouridine-3'-phosphate
  modified_base 21: mod_base = OTHER; note = 2'-O-methyladenosine-3'-phosphorothioate
  modified_base 22: mod_base = OTHER; note = 2'-O-methylguanosine-3'-phosphorothioate
  modified_base 23: mod_base = OTHER; note = 2'-O-methylguanosine
agagaagaccttgaccacgtagg

SEQ ID NO: 382 - RNA, 23 nt, synthetic construct
  source 1..23: mol_type = other RNA
  modified_base 1: mod_base = OTHER; note = 2'-O-methyluridine-3'-phosphorothioate
  modified_base 2: mod_base = OTHER; note = 2'-deoxy-2'-fluorocytidine-3'-phosphorothioate
  modified_base 3: mod_base = OTHER; note = 2'-O-methylcytidine-3'-phosphate
  modified_base 4: mod_base = OTHER; note = 2'-deoxy-2'-fluoroadenosine-3'-phosphate
  modified_base 5: mod_base = OTHER; note = 2'-O-methylcytidine-3'-phosphate
  modified_base 6: mod_base = OTHER; note = 2'-deoxy-2'-fluorouridine-3'-phosphate
  modified_base 7: mod_base = OTHER; note = 2'-O-methyladenosine-3'-phosphate
  modified_base 8: mod_base = OTHER; note = 2'-deoxy-2'-fluorouridine-3'-phosphate
  modified_base 9: mod_base = OTHER; note = 2'-O-methylguanosine-3'-phosphate
  modified_base 10: mod_base = OTHER; note = 2'-deoxy-2'-fluoroadenosine-3'-phosphate
  modified_base 11: mod_base = OTHER; note = 2'-O-methylcytidine-3'-phosphate
  modified_base 12: mod_base = OTHER; note = 2'-O-methylcytidine-3'-phosphate
  modified_base 13: mod_base = OTHER; note = 2'-O-methyluridine-3'-phosphate
  modified_base 14: mod_base = OTHER; note = 2'-deoxy-2'-fluorocytidine-3'-phosphate
  modified_base 15: mod_base = OTHER; note = 2'-O-methylguanosine-3'-phosphate
  modified_base 16: mod_base = OTHER; note = 2'-deoxy-2'-fluoroadenosine-3'-phosphate
  modified_base 17: mod_base = OTHER; note = 2'-O-methyladenosine-3'-phosphate
  modified_base 18: mod_base = OTHER; note = 2'-deoxy-2'-fluoroadenosine-3'-phosphate
  modified_base 19: mod_base = OTHER; note = 2'-O-methylcytidine-3'-phosphate
  modified_base 20: mod_base = OTHER; note = 2'-deoxy-2'-fluorouridine-3'-phosphate
  modified_base 21: mod_base = OTHER; note = 2'-O-methylguanosine-3'-phosphorothioate
  modified_base 22: mod_base = OTHER; note = 2'-O-methylguanosine-3'-phosphorothioate
  modified_base 23: mod_base = OTHER; note = 2'-O-methylguanosine
tccactatgacctcgaaactggg

SEQ ID NO: 383 - RNA, 23 nt, synthetic construct
  source 1..23: mol_type = other RNA
  modified_base 1: mod_base = OTHER; note = 2'-O-methyladenosine-3'-phosphorothioate
  modified_base 2: mod_base = OTHER; note = 2'-deoxy-2'-fluorouridine-3'-phosphorothioate
  modified_base 3: mod_base = OTHER; note = 2'-O-methyluridine-3'-phosphate
  modified_base 4: mod_base = OTHER; note = 2'-deoxy-2'-fluorocytidine-3'-phosphate
  modified_base 5: mod_base = OTHER; note = 2'-O-methyluridine-3'-phosphate
  modified_base 6: mod_base = OTHER; note = 2'-deoxy-2'-fluoroguanosine-3'-phosphate
  modified_base 7: mod_base = OTHER; note = 2'-O-methyladenosine-3'-phosphate
  modified_base 8: mod_base = OTHER; note = 2'-deoxy-2'-fluorouridine-3'-phosphate
  modified_base 9: mod_base = OTHER; note = 2'-O-methyluridine-3'-phosphate
  modified_base 10: mod_base = OTHER; note = 2'-deoxy-2'-fluorocytidine-3'-phosphate
  modified_base 11: mod_base = OTHER; note = 2'-O-methylcytidine-3'-phosphate
  modified_base 12: mod_base = OTHER; note = 2'-O-methyluridine-3'-phosphate
  modified_base 13: mod_base = OTHER; note = 2'-O-methyluridine-3'-phosphate
  modified_base 14: mod_base = OTHER; note = 2'-deoxy-2'-fluorocytidine-3'-phosphate
  modified_base 15: mod_base = OTHER; note = 2'-O-methylcytidine-3'-phosphate
  modified_base 16: mod_base = OTHER; note = 2'-deoxy-2'-fluoroguanosine-3'-phosphate
  modified_base 17: mod_base = OTHER; note = 2'-O-methylguanosine-3'-phosphate
  modified_base 18: mod_base = OTHER; note = 2'-deoxy-2'-fluorocytidine-3'-phosphate
  modified_base 19: mod_base = OTHER; note = 2'-O-methyladenosine-3'-phosphate
  modified_base 20: mod_base = OTHER; note = 2'-deoxy-2'-fluorocytidine-3'-phosphate
  modified_base 21: mod_base = OTHER; note = 2'-O-methylguanosine-3'-phosphorothioate
  modified_base 22: mod_base = OTHER; note = 2'-O-methyladenosine-3'-phosphorothioate
  modified_base 23: mod_base = OTHER; note = 2'-O-methylcytidine
attctgattccttccggcacgac

SEQ ID NO: 384 - RNA, 23 nt, synthetic construct
  source 1..23: mol_type = other RNA
  modified_base 1: mod_base = OTHER; note = 2'-O-methyluridine-3'-phosphorothioate
  modified_base 2: mod_base = OTHER; note = 2'-deoxy-2'-fluorocytidine-3'-phosphorothioate
  modified_base 3: mod_base = OTHER; note = 2'-O-methyluridine-3'-phosphate
  modified_base 4: mod_base = OTHER; note = 2'-deoxy-2'-fluoroguanosine-3'-phosphate
  modified_base 5: mod_base = OTHER; note = 2'-O-methylcytidine-3'-phosphate
  modified_base 6: mod_base = OTHER; note = 2'-deoxy-2'-fluorocytidine-3'-phosphate
  modified_base 7: mod_base = OTHER; note = 2'-O-methyladenosine-3'-phosphate
  modified_base 8: mod_base = OTHER; note = 2'-deoxy-2'-fluorocytidine-3'-phosphate
  modified_base 9: mod_base = OTHER; note = 2'-O-methyladenosine-3'-phosphate
  modified_base 10: mod_base = OTHER; note = 2'-deoxy-2'-fluorocytidine-3'-phosphate
  modified_base 11: mod_base = OTHER; note = 2'-O-methyladenosine-3'-phosphate
  modified_base 12: mod_base = OTHER; note = 2'-O-methylguanosine-3'-phosphate
  modified_base 13: mod_base = OTHER; note = 2'-O-methyladenosine-3'-phosphate
  modified_base 14: mod_base = OTHER; note = 2'-deoxy-2'-fluorouridine-3'-phosphate
  modified_base 15: mod_base = OTHER; note = 2'-O-methylcytidine-3'-phosphate
  modified_base 16: mod_base = OTHER; note = 2'-deoxy-2'-fluorocytidine-3'-phosphate
  modified_base 17: mod_base = OTHER; note = 2'-O-methylcytidine-3'-phosphate
  modified_base 18: mod_base = OTHER; note = 2'-deoxy-2'-fluorouridine-3'-phosphate
  modified_base 19: mod_base = OTHER; note = 2'-O-methyluridine-3'-phosphate
  modified_base 20: mod_base = OTHER; note = 2'-deoxy-2'-fluorouridine-3'-phosphate
  modified_base 21: mod_base = OTHER; note = 2'-O-methylcytidine-3'-phosphorothioate
  modified_base 22: mod_base = OTHER; note = 2'-O-methyluridine-3'-phosphorothioate
  modified_base 23: mod_base = OTHER; note = 2'-O-methyluridine
tctgccacacagatccctttctt

SEQ ID NO: 385 - RNA, 23 nt, synthetic construct
  source 1..23: mol_type = other RNA
  modified_base 1: mod_base = OTHER; note = 2'-O-methyluridine-3'-phosphorothioate
  modified_base 2: mod_base = OTHER; note = 2'-deoxy-2'-fluorouridine-3'-phosphorothioate
  modified_base 3: mod_base = OTHER; note = 2'-O-methylguanosine-3'-phosphate
  modified_base 4: mod_base = OTHER; note = 2'-deoxy-2'-fluorouridine-3'-phosphate
  modified_base 5: mod_base = OTHER; note = 2'-O-methyladenosine-3'-phosphate
  modified_base 6: mod_base = OTHER; note = 2'-deoxy-2'-fluoroguanosine-3'-phosphate
  modified_base 7: mod_base = OTHER; note = 2'-O-methyladenosine-3'-phosphate
  modified_base 8: mod_base = OTHER; note = 2'-deoxy-2'-fluorouridine-3'-phosphate
  modified_base 9: mod_base = OTHER; note = 2'-O-methylguanosine-3'-phosphate
  modified_base 10: mod_base = OTHER; note = 2'-deoxy-2'-fluoroguanosine-3'-phosphate
  modified_base 11: mod_base = OTHER; note = 2'-O-methyluridine-3'-phosphate
  modified_base 12: mod_base = OTHER; note = 2'-O-methylcytidine-3'-phosphate
  modified_base 13: mod_base = OTHER; note = 2'-O-methyluridine-3'-phosphate
  modified_base 14: mod_base = OTHER; note = 2'-deoxy-2'-fluorouridine-3'-phosphate
  modified_base 15: mod_base = OTHER; note = 2'-O-methylguanosine-3'-phosphate
  modified_base 16: mod_base = OTHER; note = 2'-deoxy-2'-fluorouridine-3'-phosphate
  modified_base 17: mod_base = OTHER; note = 2'-O-methylcytidine-3'-phosphate
  modified_base 18: mod_base = OTHER; note = 2'-deoxy-2'-fluorouridine-3'-phosphate
  modified_base 19: mod_base = OTHER; note = 2'-O-methylguanosine-3'-phosphate
  modified_base 20: mod_base = OTHER; note = 2'-deoxy-2'-fluorouridine-3'-phosphate
  modified_base 21: mod_base = OTHER; note = 2'-O-methylcytidine-3'-phosphorothioate
  modified_base 22: mod_base = OTHER; note = 2'-O-methyluridine-3'-phosphorothioate
  modified_base 23: mod_base = OTHER; note = 2'-O-methylguanosine
ttgtagatggtcttgtctgtctg

SEQ ID NO: 386 - RNA, 23 nt, synthetic construct
  source 1..23: mol_type = other RNA
  modified_base 1: mod_base = OTHER; note = 2'-O-methylguanosine-3'-phosphorothioate
  modified_base 2: mod_base = OTHER; note = 2'-deoxy-2'-fluorouridine-3'-phosphorothioate
  modified_base 3: mod_base = OTHER; note = 2'-O-methylcytidine-3'-phosphate
  modified_base 4: mod_base = OTHER; note = 2'-deoxy-2'-fluoroadenosine-3'-phosphate
  modified_base 5: mod_base = OTHER; note = 2'-O-methylcytidine-3'-phosphate
  modified_base 6: mod_base = OTHER; note = 2'-deoxy-2'-fluoroguanosine-3'-phosphate
  modified_base 7: mod_base = OTHER; note = 2'-O-methyladenosine-3'-phosphate
  modified_base 8: mod_base = OTHER; note = 2'-deoxy-2'-fluoroadenosine-3'-phosphate
  modified_base 9: mod_base = OTHER; note = 2'-O-methylcytidine-3'-phosphate
  modified_base 10: mod_base = OTHER; note = 2'-deoxy-2'-fluoroadenosine-3'-phosphate
  modified_base 11: mod_base = OTHER; note = 2'-O-methylcytidine-3'-phosphate
  modified_base 12: mod_base = OTHER; note = 2'-O-methylcytidine-3'-phosphate
  modified_base 13: mod_base = OTHER; note = 2'-O-methyladenosine-3'-phosphate
  modified_base 14: mod_base = OTHER; note = 2'-deoxy-2'-fluorouridine-3'-phosphate
  modified_base 15: mod_base = OTHER; note = 2'-O-methylguanosine-3'-phosphate
  modified_base 16: mod_base = OTHER; note = 2'-deoxy-2'-fluoroadenosine-3'-phosphate
  modified_base 17: mod_base = OTHER; note = 2'-O-methylguanosine-3'-phosphate
  modified_base 18: mod_base = OTHER; note = 2'-deoxy-2'-fluoroguanosine-3'-phosphate
  modified_base 19: mod_base = OTHER; note = 2'-O-methyluridine-3'-phosphate
  modified_base 20: mod_base = OTHER; note = 2'-deoxy-2'-fluorocytidine-3'-phosphate
  modified_base 21: mod_base = OTHER; note = 2'-O-methyladenosine-3'-phosphorothioate
  modified_base 22: mod_base = OTHER; note = 2'-O-methyladenosine-3'-phosphorothioate
  modified_base 23: mod_base = OTHER; note = 2'-O-methyladenosine
gtcacgaacaccatgaggtcaaa

SEQ ID NO: 387 - RNA, 23 nt, synthetic construct
  source 1..23: mol_type = other RNA
  modified_base 1: mod_base = OTHER; note = 2'-O-methylcytidine-3'-phosphorothioate
  modified_base 2: mod_base = OTHER; note = 2'-deoxy-2'-fluorouridine-3'-phosphorothioate
  modified_base 3: mod_base = OTHER; note = 2'-O-methyluridine-3'-phosphate
  modified_base 4: mod_base = OTHER; note = 2'-deoxy-2'-fluoroguanosine-3'-phosphate
  modified_base 5: mod_base = OTHER; note = 2'-O-methyladenosine-3'-phosphate
  modified_base 6: mod_base = OTHER; note = 2'-deoxy-2'-fluoroguanosine-3'-phosphate
  modified_base 7: mod_base = OTHER; note = 2'-O-methylguanosine-3'-phosphate
  modified_base 8: mod_base = OTHER; note = 2'-deoxy-2'-fluorouridine-3'-phosphate
  modified_base 9: mod_base = OTHER; note = 2'-O-methylcytidine-3'-phosphate
  modified_base 10: mod_base = OTHER; note = 2'-deoxy-2'-fluoroguanosine-3'-phosphate
  modified_base 11: mod_base = OTHER; note = 2'-O-methyladenosine-3'-phosphate
  modified_base 12: mod_base = OTHER; note = 2'-O-methyladenosine-3'-phosphate
  modified_base 13: mod_base = OTHER; note = 2'-O-methyluridine-3'-phosphate
  modified_base 14: mod_base = OTHER; note = 2'-deoxy-2'-fluorouridine-3'-phosphate
  modified_base 15: mod_base = OTHER; note = 2'-O-methyluridine-3'-phosphate
  modified_base 16: mod_base = OTHER; note = 2'-deoxy-2'-fluoroadenosine-3'-phosphate
  modified_base 17: mod_base = OTHER; note = 2'-O-methyluridine-3'-phosphate
  modified_base 18: mod_base = OTHER; note = 2'-deoxy-2'-fluorouridine-3'-phosphate
  modified_base 19: mod_base = OTHER; note = 2'-O-methyladenosine-3'-phosphate
  modified_base 20: mod_base = OTHER; note = 2'-deoxy-2'-fluorocytidine-3'-phosphate
  modified_base 21: mod_base = OTHER; note = 2'-O-methyladenosine-3'-phosphorothioate
  modified_base 22: mod_base = OTHER; note = 2'-O-methylguanosine-3'-phosphorothioate
  modified_base 23: mod_base = OTHER; note = 2'-O-methylguanosine
cttgaggtcgaatttattacagg

SEQ ID NO: 388 - RNA, 23 nt, synthetic construct
  source 1..23: mol_type = other RNA
  modified_base 1: mod_base = OTHER; note = 2'-O-methyluridine-3'-phosphorothioate
  modified_base 2: mod_base = OTHER; note = 2'-deoxy-2'-fluorocytidine-3'-phosphorothioate
  modified_base 3: mod_base = OTHER; note = 2'-O-methyluridine-3'-phosphate
  modified_base 4: mod_base = OTHER; note = 2'-deoxy-2'-fluorocytidine-3'-phosphate
  modified_base 5: mod_base = OTHER; note = 2'-O-methyluridine-3'-phosphate
  modified_base 6: mod_base = OTHER; note = 2'-deoxy-2'-fluoroguanosine-3'-phosphate
  modified_base 7: mod_base = OTHER; note = 2'-O-methyluridine-3'-phosphate
  modified_base 8: mod_base = OTHER; note = 2'-deoxy-2'-fluoroadenosine-3'-phosphate
  modified_base 9: mod_base = OTHER; note = 2'-O-methylguanosine-3'-phosphate
  modified_base 10: mod_base = OTHER; note = 2'-deoxy-2'-fluoroguanosine-3'-phosphate
  modified_base 11: mod_base = OTHER; note = 2'-O-methyluridine-3'-phosphate
  modified_base 12: mod_base = OTHER; note = 2'-O-methyluridine-3'-phosphate
  modified_base 13: mod_base = OTHER; note = 2'-O-methylcytidine-3'-phosphate
  modified_base 14: mod_base = OTHER; note = 2'-deoxy-2'-fluoroadenosine-3'-phosphate
  modified_base 15: mod_base = OTHER; note = 2'-O-methyluridine-3'-phosphate
  modified_base 16: mod_base = OTHER; note = 2'-deoxy-2'-fluoroguanosine-3'-phosphate
  modified_base 17: mod_base = OTHER; note = 2'-O-methyluridine-3'-phosphate
  modified_base 18: mod_base = OTHER; note = 2'-deoxy-2'-fluoroadenosine-3'-phosphate
  modified_base 19: mod_base = OTHER; note = 2'-O-methylguanosine-3'-phosphate
  modified_base 20: mod_base = OTHER; note = 2'-deoxy-2'-fluorouridine-3'-phosphate
  modified_base 21: mod_base = OTHER; note = 2'-O-methyluridine-3'-phosphorothioate
  modified_base 22: mod_base = OTHER; note = 2'-O-methylguanosine-3'-phosphorothioate
  modified_base 23: mod_base = OTHER; note = 2'-O-methylguanosine
tctctgtaggttcatgtagttgg

SEQ ID NO: 389 - RNA, 21 nt, synthetic construct
  source 1..21: mol_type = other RNA
ttttgacaatgagttctacaa

SEQ ID NO: 390 - RNA, 21 nt, synthetic construct
  source 1..21: mol_type = other RNA
atcaatgaatttagtgtaaga

SEQ ID NO: 391 - RNA, 21 nt, synthetic construct
  source 1..21: mol_type = other RNA
agacaaatgtttcgttcaaga

SEQ ID NO: 392 - RNA, 21 nt, synthetic construct
  source 1..21: mol_type = other RNA
cttttgacaatgagttctaca

SEQ ID NO: 393 - RNA, 21 nt, synthetic construct
  source 1..21: mol_type = other RNA
aacttggaaagagccattgaa

SEQ ID NO: 394 - RNA, 21 nt, synthetic construct
  source 1..21: mol_type = other RNA
tacctgagaagctgattaaca

SEQ ID NO: 395 - RNA, 21 nt, synthetic construct
  source 1..21: mol_type = other RNA
accttttgacaatgagttcta

SEQ ID NO: 396 - RNA, 21 nt, synthetic construct
  source 1..21: mol_type = other RNA
gactgcggaaatgactttcaa

SEQ ID NO: 397 - RNA, 21 nt, synthetic construct
  source 1..21: mol_type = other RNA
gcccattcaaatttgagggaa

SEQ ID NO: 398 - RNA, 21 nt, synthetic construct
  source 1..21: mol_type = other RNA
ttttggataaagcttccatga

SEQ ID NO: 399 - RNA, 21 nt, synthetic construct
  source 1..21: mol_type = other RNA
aaccaaaggcgagaaaaattt

SEQ ID NO: 400 - RNA, 21 nt, synthetic construct
  source 1..21: mol_type = other RNA
ctttgccaactacctatgaaa

SEQ ID NO: 401 - RNA, 21 nt, synthetic construct
  source 1..21: mol_type = other RNA
caccttttgacaatgagttct

SEQ ID NO: 402 - RNA, 21 nt, synthetic construct
  source 1..21: mol_type = other RNA
gagaagacatcaaattttaat

SEQ ID NO: 403 - RNA, 21 nt, synthetic construct
  source 1..21: mol_type = other RNA
gacaatgagttctacaatgga

SEQ ID NO: 404 - RNA, 21 nt, synthetic construct
  source 1..21: mol_type = other RNA
tttggataaagcttccatgaa

SEQ ID NO: 405 - RNA, 21 nt, synthetic construct
  source 1..21: mol_type = other RNA
atctatgaaaccaaaggcgag

SEQ ID NO: 406 - RNA, 21 nt, synthetic construct
  source 1..21: mol_type = other RNA
atatcaatgaatttagtgtaa

SEQ ID NO: 407 - RNA, 21 nt, synthetic construct
  source 1..21: mol_type = other RNA
cacaccttttgacaatgagtt

SEQ ID NO: 408 - RNA, 21 nt, synthetic construct
  source 1..21: mol_type = other RNA
tagggtctgagaccttttgaa

SEQ ID NO: 409 - RNA, 21 nt, synthetic construct
  source 1..21: mol_type = other RNA
caaaacttggaaagagccatt

SEQ ID NO: 410 - RNA, 21 nt, synthetic construct
  source 1..21: mol_type = other RNA
gcacaccttttgacaatgagt

SEQ ID NO: 411 - RNA, 21 nt, synthetic construct
  source 1..21: mol_type = other RNA
tgaaaccaaaggcgagaaaaa

SEQ ID NO: 412 - RNA, 23 nt, synthetic construct
  source 1..23: mol_type = other RNA
ttgtagaactcattgtcaaaagg

SEQ ID NO: 413 - RNA, 23 nt, synthetic construct
  source 1..23: mol_type = other RNA
tcttacactaaattcattgatat

SEQ ID NO: 414 - RNA, 23 nt, synthetic construct
  source 1..23: mol_type = other RNA
tcttgaacgaaacatttgtctga

SEQ ID NO: 415 - RNA, 23 nt, synthetic construct
  source 1..23: mol_type = other RNA
tgtagaactcattgtcaaaaggt

SEQ ID NO: 416 - RNA, 23 nt, synthetic construct
  source 1..23: mol_type = other RNA
ttcaatggctctttccaagtttt

SEQ ID NO: 417 - RNA, 23 nt, synthetic construct
  source 1..23: mol_type = other RNA
tgttaatcagcttctcaggtagg

SEQ ID NO: 418 - RNA, 23 nt, synthetic construct
  source 1..23: mol_type = other RNA
tagaactcattgtcaaaaggtgt

SEQ ID NO: 419 - RNA, 23 nt, synthetic construct
  source 1..23: mol_type = other RNA
ttgaaagtcatttccgcagtcat

SEQ ID NO: 420 - RNA, 23 nt, synthetic construct
  source 1..23: mol_type = other RNA
ttccctcaaatttgaatgggcag

SEQ ID NO: 421 - RNA, 23 nt, synthetic construct
  source 1..23: mol_type = other RNA
tcatggaagctttatccaaaaca

SEQ ID NO: 422 - RNA, 23 nt, synthetic construct
  source 1..23: mol_type = other RNA
aaatttttctcgcctttggtttc

SEQ ID NO: 423 - RNA, 23 nt, synthetic construct
  source 1..23: mol_type = other RNA
tttcataggtagttggcaaagct

SEQ ID NO: 424 - RNA, 23 nt, synthetic construct
  source 1..23: mol_type = other RNA
agaactcattgtcaaaaggtgtg

SEQ ID NO: 425 - RNA, 23 nt, synthetic construct
  source 1..23: mol_type = other RNA
attaaaatttgatgtcttctctt

SEQ ID NO: 426 - RNA, 23 nt, synthetic construct
  source 1..23: mol_type = other RNA
tccattgtagaactcattgtcaa

SEQ ID NO: 427 - RNA, 23 nt, synthetic construct
  source 1..23: mol_type = other RNA
ttcatggaagctttatccaaaac

SEQ ID NO: 428 - RNA, 23 nt, synthetic construct
  source 1..23: mol_type = other RNA
ctcgcctttggtttcatagatca

SEQ ID NO: 429 - RNA, 23 nt, synthetic construct
  source 1..23: mol_type = other RNA
ttacactaaattcattgatatag

SEQ ID NO: 430 - RNA, 23 nt, synthetic construct
  source 1..23: mol_type = other RNA
aactcattgtcaaaaggtgtgct

SEQ ID NO: 431 - RNA, 23 nt, synthetic construct
  source 1..23: mol_type = other RNA
ttcaaaaggtctcagaccctaag

SEQ ID NO: 432 - RNA, 23 nt, synthetic construct
  source 1..23: mol_type = other RNA
aatggctctttccaagttttgtt

SEQ ID NO: 433 - RNA, 23 nt, synthetic construct
  source 1..23: mol_type = other RNA
actcattgtcaaaaggtgtgctt

SEQ ID NO: 434 - RNA, 23 nt, synthetic construct
  source 1..23: mol_type = other RNA
tttttctcgcctttggtttcata

SEQ ID NO: 435 - RNA, 21 nt, synthetic construct
  source 1..21: mol_type = other RNA
  modified_base 1: mod_base = OTHER; note = 2'-deoxy-2'-fluorouridine-3'-phosphorothioate
  modified_base 2: mod_base = OTHER; note = 2'-O-methyluridine-3'-phosphorothioate
  modified_base 3: mod_base = OTHER; note = 2'-deoxy-2'-fluorouridine-3'-phosphate
  modified_base 4: mod_base = OTHER; note = 2'-O-methyluridine-3'-phosphate
  modified_base 5: mod_base = OTHER; note = 2'-deoxy-2'-fluoroguanosine-3'-phosphate
  modified_base 6: mod_base = OTHER; note = 2'-O-methyladenosine-3'-phosphate
  modified_base 7: mod_base = OTHER; note = 2'-deoxy-2'-fluorocytidine-3'-phosphate
  modified_base 8: mod_base = OTHER; note = 2'-O-methyladenosine-3'-phosphate
  modified_base 9: mod_base = OTHER; note = 2'-deoxy-2'-fluoroadenosine-3'-phosphate
  modified_base 10: mod_base = OTHER; note = 2'-deoxy-2'-fluorouridine-3'-phosphate
  modified_base 11: mod_base = OTHER; note = 2'-deoxy-2'-fluoroguanosine-3'-phosphate
  modified_base 12: mod_base = OTHER; note = 2'-O-methyladenosine-3'-phosphate
  modified_base 13: mod_base = OTHER; note = 2'-deoxy-2'-fluoroguanosine-3'-phosphate
  modified_base 14: mod_base = OTHER; note = 2'-O-methyluridine-3'-phosphate
  modified_base 15: mod_base = OTHER; note = 2'-deoxy-2'-fluorouridine-3'-phosphate
  modified_base 16: mod_base = OTHER; note = 2'-O-methylcytidine-3'-phosphate
  modified_base 17: mod_base = OTHER; note = 2'-deoxy-2'-fluorouridine-3'-phosphate
  modified_base 18: mod_base = OTHER; note = 2'-O-methyladenosine-3'-phosphate
  modified_base 19: mod_base = OTHER; note = 2'-deoxy-2'-fluorocytidine-3'-phosphate
  modified_base 20: mod_base = OTHER; note = 2'-O-methyladenosine-3'-phosphate
  modified_base 21: mod_base = OTHER; note = 2'-deoxy-2'-fluoroadenosine-3'-phosphate ((2S,4R)-1-[29-[[2-(acetylamino)-2-deoxy-beta-D-galactopyra nosyl]oxy]-14,14-bis[[3-[[3-[[5-[[2-(acetylamino)-2-deoxy-b eta-D-galactopyranosyl]oxy]-1-oxopentyl]amino]propyl]amino] -3-oxopropoxy]methyl]-1,12,19,25-tetraoxo-16-oxa-13,20,24-t riazanonacos-1-yl]-4-hydroxy-2-pyrrolidinyl)methyl ester
ttttgacaatgagttctacaa

SEQ ID NO: 436 - RNA, 21 nt, synthetic construct
  source 1..21: mol_type = other RNA
  modified_base 1: mod_base = OTHER; note = 2'-deoxy-2'-fluoroadenosine-3'-phosphorothioate
  modified_base 2: mod_base = OTHER; note = 2'-O-methyluridine-3'-phosphorothioate
  modified_base 3: mod_base = OTHER; note = 2'-deoxy-2'-fluorocytidine-3'-phosphate
  modified_base 4: mod_base = OTHER; note = 2'-O-methyladenosine-3'-phosphate
  modified_base 5: mod_base = OTHER; note = 2'-deoxy-2'-fluoroadenosine-3'-phosphate
  modified_base 6: mod_base = OTHER; note = 2'-O-methyluridine-3'-phosphate
  modified_base 7: mod_base = OTHER; note = 2'-deoxy-2'-fluoroguanosine-3'-phosphate
  modified_base 8: mod_base = OTHER; note = 2'-O-methyladenosine-3'-phosphate
  modified_base 9: mod_base = OTHER; note = 2'-deoxy-2'-fluoroadenosine-3'-phosphate
  modified_base 10: mod_base = OTHER; note = 2'-deoxy-2'-fluorouridine-3'-phosphate
  modified_base 11: mod_base = OTHER; note = 2'-deoxy-2'-fluorouridine-3'-phosphate
  modified_base 12: mod_base = OTHER; note = 2'-O-methyluridine-3'-phosphate
  modified_base 13: mod_base = OTHER; note = 2'-deoxy-2'-fluoroadenosine-3'-phosphate
  modified_base 14: mod_base = OTHER; note = 2'-O-methylguanosine-3'-phosphate
  modified_base 15: mod_base = OTHER; note = 2'-deoxy-2'-fluorouridine-3'-phosphate
  modified_base 16: mod_base = OTHER; note = 2'-O-methylguanosine-3'-phosphate
  modified_base 17: mod_base = OTHER; note = 2'-deoxy-2'-fluorouridine-3'-phosphate
  modified_base 18: mod_base = OTHER; note = 2'-O-methyladenosine-3'-phosphate
  modified_base 19: mod_base = OTHER; note = 2'-deoxy-2'-fluoroadenosine-3'-phosphate
  modified_base 20: mod_base = OTHER; note = 2'-O-methylguanosine-3'-phosphate
  modified_base 21: mod_base = OTHER; note = 2'-deoxy-2'-fluoroadenosine-3'-phosphate ((2S,4R)-1-[29-[[2-(acetylamino)-2-deoxy-beta-D-galactopyra nosyl]oxy]-14,14-bis[[3-[[3-[[5-[[2-(acetylamino)-2-deoxy-b eta-D-galactopyranosyl]oxy]-1-oxopentyl]amino]propyl]amino] -3-oxopropoxy]methyl]-1,12,19,25-tetraoxo-16-oxa-13,20,24-t riazanonacos-1-yl]-4-hydroxy-2-pyrrolidinyl)methyl ester
atcaatgaatttagtgtaaga

SEQ ID NO: 437 - RNA, 21 nt, synthetic construct
  source 1..21: mol_type = other RNA
  modified_base 1: mod_base = OTHER; note = 2'-deoxy-2'-fluoroadenosine-3'-phosphorothioate
  modified_base 2: mod_base = OTHER; note = 2'-O-methylguanosine-3'-phosphorothioate
  modified_base 3: mod_base = OTHER; note = 2'-deoxy-2'-fluoroadenosine-3'-phosphate
  modified_base 4: mod_base = OTHER; note = 2'-O-methylcytidine-3'-phosphate
  modified_base 5: mod_base = OTHER; note = 2'-deoxy-2'-fluoroadenosine-3'-phosphate
  modified_base 6: mod_base = OTHER; note = 2'-O-methyladenosine-3'-phosphate
  modified_base 7: mod_base = OTHER; note = 2'-deoxy-2'-fluoroadenosine-3'-phosphate
  modified_base 8: mod_base = OTHER; note = 2'-O-methyluridine-3'-phosphate
  modified_base 9: mod_base = OTHER; note = 2'-deoxy-2'-fluoroguanosine-3'-phosphate
  modified_base 10: mod_base = OTHER; note = 2'-deoxy-2'-fluorouridine-3'-phosphate
  modified_base 11: mod_base = OTHER; note = 2'-deoxy-2'-fluorouridine-3'-phosphate
  modified_base 12: mod_base = OTHER; note = 2'-O-methyluridine-3'-phosphate
  modified_base 13: mod_base = OTHER; note = 2'-deoxy-2'-fluorocytidine-3'-phosphate
  modified_base 14: mod_base = OTHER; note = 2'-O-methylguanosine-3'-phosphate
  modified_base 15: mod_base = OTHER; note = 2'-deoxy-2'-fluorouridine-3'-phosphate
  modified_base 16: mod_base = OTHER; note = 2'-O-methyluridine-3'-phosphate
  modified_base 17: mod_base = OTHER; note = 2'-deoxy-2'-fluorocytidine-3'-phosphate
  modified_base 18: mod_base = OTHER; note = 2'-O-methyladenosine-3'-phosphate
  modified_base 19: mod_base = OTHER; note = 2'-deoxy-2'-fluoroadenosine-3'-phosphate
  modified_base 20: mod_base = OTHER; note = 2'-O-methylguanosine-3'-phosphate
  modified_base 21: mod_base = OTHER; note = 2'-deoxy-2'-fluoroadenosine-3'-phosphate ((2S,4R)-1-[29-[[2-(acetylamino)-2-deoxy-beta-D-galactopyra nosyl]oxy]-14,14-bis[[3-[[3-[[5-[[2-(acetylamino)-2-deoxy-b eta-D-galactopyranosyl]oxy]-1-oxopentyl]amino]propyl]amino] -3-oxopropoxy]methyl]-1,12,19,25-tetraoxo-16-oxa-13,20,24-t riazanonacos-1-yl]-4-hydroxy-2-pyrrolidinyl)methyl ester
agacaaatgtttcgttcaaga

SEQ ID NO: 438 - RNA, 21 nt, synthetic construct
  source 1..21: mol_type = other RNA
  modified_base 1: mod_base = OTHER; note = 2'-deoxy-2'-fluorocytidine-3'-phosphorothioate
  modified_base 2: mod_base = OTHER; note = 2'-O-methyluridine-3'-phosphorothioate
  modified_base 3: mod_base = OTHER; note = 2'-deoxy-2'-fluorouridine-3'-phosphate
  modified_base 4: mod_base = OTHER; note = 2'-O-methyluridine-3'-phosphate
  modified_base 5: mod_base = OTHER; note = 2'-deoxy-2'-fluorouridine-3'-phosphate
  modified_base 6: mod_base = OTHER; note = 2'-O-methylguanosine-3'-phosphate
  modified_base 7: mod_base = OTHER; note = 2'-deoxy-2'-fluoroadenosine-3'-phosphate
  modified_base 8: mod_base = OTHER; note = 2'-O-methylcytidine-3'-phosphate
  modified_base 9: mod_base = OTHER; note = 2'-deoxy-2'-fluoroadenosine-3'-phosphate
  modified_base 10: mod_base = OTHER; note = 2'-deoxy-2'-fluoroadenosine-3'-phosphate
  modified_base 11: mod_base = OTHER; note = 2'-deoxy-2'-fluorouridine-3'-phosphate
  modified_base 12: mod_base = OTHER; note = 2'-O-methylguanosine-3'-phosphate
  modified_base 13: mod_base = OTHER; note = 2'-deoxy-2'-fluoroadenosine-3'-phosphate
  modified_base 14: mod_base = OTHER; note = 2'-O-methylguanosine-3'-phosphate
  modified_base 15: mod_base = OTHER; note = 2'-deoxy-2'-fluorouridine-3'-phosphate
  modified_base 16: mod_base = OTHER; note = 2'-O-methyluridine-3'-phosphate
  modified_base 17: mod_base = OTHER; note = 2'-deoxy-2'-fluorocytidine-3'-phosphate
  modified_base 18: mod_base = OTHER; note = 2'-O-methyluridine-3'-phosphate
  modified_base 19: mod_base = OTHER; note = 2'-deoxy-2'-fluoroadenosine-3'-phosphate
  modified_base 20: mod_base = OTHER; note = 2'-O-methylcytidine-3'-phosphate
  modified_base 21: mod_base = OTHER; note = 2'-deoxy-2'-fluoroadenosine-3'-phosphate ((2S,4R)-1-[29-[[2-(acetylamino)-2-deoxy-beta-D-galactopyra nosyl]oxy]-14,14-bis[[3-[[3-[[5-[[2-(acetylamino)-2-deoxy-b eta-D-galactopyranosyl]oxy]-1-oxopentyl]amino]propyl]amino] -3-oxopropoxy]methyl]-1,12,19,25-tetraoxo-16-oxa-13,20,24-t riazanonacos-1-yl]-4-hydroxy-2-pyrrolidinyl)methyl ester
cttttgacaatgagttctaca

SEQ ID NO: 439 - RNA, 21 nt, synthetic construct
  source 1..21: mol_type = other RNA
  modified_base 1: mod_base = OTHER; note = 2'-deoxy-2'-fluoroadenosine-3'-phosphorothioate
  modified_base 2: mod_base = OTHER; note = 2'-O-methyladenosine-3'-phosphorothioate
  modified_base 3: mod_base = OTHER; note = 2'-deoxy-2'-fluorocytidine-3'-phosphate
  modified_base 4: mod_base = OTHER; note = 2'-O-methyluridine-3'-phosphate
  modified_base 5: mod_base = OTHER; note = 2'-deoxy-2'-fluorouridine-3'-phosphate
  modified_base 6: mod_base = OTHER; note = 2'-O-methylguanosine-3'-phosphate
  modified_base 7: mod_base = OTHER; note = 2'-deoxy-2'-fluoroguanosine-3'-phosphate
  modified_base 8: mod_base = OTHER; note = 2'-O-methyladenosine-3'-phosphate
  modified_base 9: mod_base = OTHER; note = 2'-deoxy-2'-fluoroadenosine-3'-phosphate
  modified_base 10: mod_base = OTHER; note = 2'-deoxy-2'-fluoroadenosine-3'-phosphate
  modified_base 11: mod_base = OTHER; note = 2'-deoxy-2'-fluoroguanosine-3'-phosphate
  modified_base 12: mod_base = OTHER; note = 2'-O-methyladenosine-3'-phosphate
  modified_base 13: mod_base = OTHER; note = 2'-deoxy-2'-fluoroguanosine-3'-phosphate
  modified_base 14: mod_base = OTHER; note = 2'-O-methylcytidine-3'-phosphate
  modified_base 15: mod_base = OTHER; note = 2'-deoxy-2'-fluorocytidine-3'-phosphate
  modified_base 16: mod_base = OTHER; note = 2'-O-methyladenosine-3'-phosphate
  modified_base 17: mod_base = OTHER; note = 2'-deoxy-2'-fluorouridine-3'-phosphate
  modified_base 18: mod_base = OTHER; note = 2'-O-methyluridine-3'-phosphate
  modified_base 19: mod_base = OTHER; note = 2'-deoxy-2'-fluoroguanosine-3'-phosphate
  modified_base 20: mod_base = OTHER; note = 2'-O-methyladenosine-3'-phosphate
  modified_base 21: mod_base = OTHER; note = 2'-deoxy-2'-fluoroadenosine-3'-phosphate ((2S,4R)-1-[29-[[2-(acetylamino)-2-deoxy-beta-D-galactopyra nosyl]oxy]-14,14-bis[[3-[[3-[[5-[[2-(acetylamino)-2-deoxy-b eta-D-galactopyranosyl]oxy]-1-oxopentyl]amino]propyl]amino] -3-oxopropoxy]methyl]-1,12,19,25-tetraoxo-16-oxa-13,20,24-t riazanonacos-1-yl]-4-hydroxy-2-pyrrolidinyl)methyl ester
aacttggaaagagccattgaa

SEQ ID NO: 440 - RNA, 21 nt, synthetic construct
  source 1..21: mol_type = other RNA
  modified_base 1: mod_base = OTHER; note = 2'-deoxy-2'-fluorouridine-3'-phosphorothioate
  modified_base 2: mod_base = OTHER; note = 2'-O-methyladenosine-3'-phosphorothioate
  modified_base 3: mod_base = OTHER; note = 2'-deoxy-2'-fluorocytidine-3'-phosphate
  modified_base 4: mod_base = OTHER; note = 2'-O-methylcytidine-3'-phosphate
  modified_base 5: mod_base = OTHER; note = 2'-deoxy-2'-fluorouridine-3'-phosphate
  modified_base 6: mod_base = OTHER; note = 2'-O-methylguanosine-3'-phosphate
  modified_base 7: mod_base = OTHER; note = 2'-deoxy-2'-fluoroadenosine-3'-phosphate
  modified_base 8: mod_base = OTHER; note = 2'-O-methylguanosine-3'-phosphate
  modified_base 9: mod_base = OTHER; note = 2'-deoxy-2'-fluoroadenosine-3'-phosphate
  modified_base 10: mod_base = OTHER; note = 2'-deoxy-2'-fluoroadenosine-3'-phosphate
  modified_base 11: mod_base = OTHER; note = 2'-deoxy-2'-fluoroguanosine-3'-phosphate
  modified_base 12: mod_base = OTHER; note = 2'-O-methylcytidine-3'-phosphate
  modified_base 13: mod_base = OTHER; note = 2'-deoxy-2'-fluorouridine-3'-phosphate
  modified_base 14: mod_base = OTHER; note = 2'-O-methylguanosine-3'-phosphate
  modified_base 15: mod_base = OTHER; note = 2'-deoxy-2'-fluoroadenosine-3'-phosphate
  modified_base 16: mod_base = OTHER; note = 2'-O-methyluridine-3'-phosphate
  modified_base 17: mod_base = OTHER; note = 2'-deoxy-2'-fluorouridine-3'-phosphate
  modified_base 18: mod_base = OTHER; note = 2'-O-methyladenosine-3'-phosphate
  modified_base 19: mod_base = OTHER; note = 2'-deoxy-2'-fluoroadenosine-3'-phosphate
  modified_base 20: mod_base = OTHER; note = 2'-O-methylcytidine-3'-phosphate
  modified_base 21: mod_base = OTHER; note = 2'-deoxy-2'-fluoroadenosine-3'-phosphate ((2S,4R)-1-[29-[[2-(acetylamino)-2-deoxy-beta-D-galactopyra nosyl]oxy]-14,14-bis[[3-[[3-[[5-[[2-(acetylamino)-2-deoxy-b eta-D-galactopyranosyl]oxy]-1-oxopentyl]amino]propyl]amino] -3-oxopropoxy]methyl]-1,12,19,25-tetraoxo-16-oxa-13,20,24-t riazanonacos-1-yl]-4-hydroxy-2-pyrrolidinyl)methyl ester
tacctgagaagctgattaaca

SEQ ID NO: 441 - RNA, 21 nt, synthetic construct
  source 1..21: mol_type = other RNA
  modified_base 1: mod_base = OTHER; note = 2'-deoxy-2'-fluoroadenosine-3'-phosphorothioate
  modified_base 2: mod_base = OTHER; note = 2'-O-methylcytidine-3'-phosphorothioate
  modified_base 3: mod_base = OTHER; note = 2'-deoxy-2'-fluorocytidine-3'-phosphate
  modified_base 4: mod_base = OTHER; note = 2'-O-methyluridine-3'-phosphate
  modified_base 5: mod_base = OTHER; note = 2'-deoxy-2'-fluorouridine-3'-phosphate
  modified_base 6: mod_base = OTHER; note = 2'-O-methyluridine-3'-phosphate
  modified_base 7: mod_base = OTHER; note = 2'-deoxy-2'-fluorouridine-3'-phosphate
  modified_base 8: mod_base = OTHER; note = 2'-O-methylguanosine-3'-phosphate
  modified_base 9: mod_base = OTHER; note = 2'-deoxy-2'-fluoroadenosine-3'-phosphate
  modified_base 10: mod_base = OTHER; note = 2'-deoxy-2'-fluorocytidine-3'-phosphate
  modified_base 11: mod_base = OTHER; note = 2'-deoxy-2'-fluoroadenosine-3'-phosphate
  modified_base 12: mod_base = OTHER; note = 2'-O-methyladenosine-3'-phosphate
  modified_base 13: mod_base = OTHER; note = 2'-deoxy-2'-fluorouridine-3'-phosphate
  modified_base 14: mod_base = OTHER; note = 2'-O-methylguanosine-3'-phosphate
  modified_base 15: mod_base = OTHER; note = 2'-deoxy-2'-fluoroadenosine-3'-phosphate
  modified_base 16: mod_base = OTHER; note = 2'-O-methylguanosine-3'-phosphate
  modified_base 17: mod_base = OTHER; note = 2'-deoxy-2'-fluorouridine-3'-phosphate
  modified_base 18: mod_base = OTHER; note = 2'-O-methyluridine-3'-phosphate
  modified_base 19: mod_base = OTHER; note = 2'-deoxy-2'-fluorocytidine-3'-phosphate
  modified_base 20: mod_base = OTHER; note = 2'-O-methyluridine-3'-phosphate
  modified_base 21: mod_base = OTHER; note = 2'-deoxy-2'-fluoroadenosine-3'-phosphate ((2S,4R)-1-[29-[[2-(acetylamino)-2-deoxy-beta-D-galactopyra nosyl]oxy]-14,14-bis[[3-[[3-[[5-[[2-(acetylamino)-2-deoxy-b eta-D-galactopyranosyl]oxy]-1-oxopentyl]amino]propyl]amino] -3-oxopropoxy]methyl]-1,12,19,25-tetraoxo-16-oxa-13,20,24-t riazanonacos-1-yl]-4-hydroxy-2-pyrrolidinyl)methyl ester
accttttgacaatgagttcta

SEQ ID NO: 442 - RNA, 21 nt, synthetic construct
  source 1..21: mol_type = other RNA
  modified_base 1: mod_base = OTHER; note = 2'-deoxy-2'-fluoroguanosine-3'-phosphorothioate
  modified_base 2: mod_base = OTHER; note = 2'-O-methyladenosine-3'-phosphorothioate
  modified_base 3: mod_base = OTHER; note = 2'-deoxy-2'-fluorocytidine-3'-phosphate
  modified_base 4: mod_base = OTHER; note = 2'-O-methyluridine-3'-phosphate
  modified_base 5: mod_base = OTHER; note = 2'-deoxy-2'-fluoroguanosine-3'-phosphate
  modified_base 6: mod_base = OTHER; note = 2'-O-methylcytidine-3'-phosphate
  modified_base 7: mod_base = OTHER; note = 2'-deoxy-2'-fluoroguanosine-3'-phosphate
  modified_base 8: mod_base = OTHER; note = 2'-O-methylguanosine-3'-phosphate
  modified_base 9: mod_base = OTHER; note = 2'-deoxy-2'-fluoroadenosine-3'-phosphate
  modified_base 10: mod_base = OTHER; note = 2'-deoxy-2'-fluoroadenosine-3'-phosphate
  modified_base 11: mod_base = OTHER; note = 2'-deoxy-2'-fluoroadenosine-3'-phosphate
  modified_base 12: mod_base = OTHER; note = 2'-O-methyluridine-3'-phosphate
  modified_base 13: mod_base = OTHER; note = 2'-deoxy-2'-fluoroguanosine-3'-phosphate
  modified_base 14: mod_base = OTHER; note = 2'-O-methyladenosine-3'-phosphate
  modified_base 15: mod_base = OTHER; note = 2'-deoxy-2'-fluorocytidine-3'-phosphate
  modified_base 16: mod_base = OTHER; note = 2'-O-methyluridine-3'-phosphate
  modified_base 17: mod_base = OTHER; note = 2'-deoxy-2'-fluorouridine-3'-phosphate
  modified_base 18: mod_base = OTHER; note = 2'-O-methyluridine-3'-phosphate
  modified_base 19: mod_base = OTHER; note = 2'-deoxy-2'-fluorocytidine-3'-phosphate
  modified_base 20: mod_base = OTHER; note = 2'-O-methyladenosine-3'-phosphate
  modified_base 21: mod_base = OTHER; note = 2'-deoxy-2'-fluoroadenosine-3'-phosphate ((2S,4R)-1-[29-[[2-(acetylamino)-2-deoxy-beta-D-galactopyra nosyl]oxy]-14,14-bis[[3-[[3-[[5-[[2-(acetylamino)-2-deoxy-b eta-D-galactopyranosyl]oxy]-1-oxopentyl]amino]propyl]amino] -3-oxopropoxy]methyl]-1,12,19,25-tetraoxo-16-oxa-13,20,24-t riazanonacos-1-yl]-4-hydroxy-2-pyrrolidinyl)methyl ester
gactgcggaaatgactttcaa

SEQ ID NO: 443 - RNA, 21 nt, synthetic construct
  source 1..21: mol_type = other RNA
  modified_base 1: mod_base = OTHER; note = 2'-deoxy-2'-fluoroguanosine-3'-phosphorothioate
  modified_base 2: mod_base = OTHER; note = 2'-O-methylcytidine-3'-phosphorothioate
  modified_base 3: mod_base = OTHER; note = 2'-deoxy-2'-fluorocytidine-3'-phosphate
  modified_base 4: mod_base = OTHER; note = 2'-O-methylcytidine-3'-phosphate
  modified_base 5: mod_base = OTHER; note = 2'-deoxy-2'-fluoroadenosine-3'-phosphate
  modified_base 6: mod_base = OTHER; note = 2'-O-methyluridine-3'-phosphate
  modified_base 7: mod_base = OTHER; note = 2'-deoxy-2'-fluorouridine-3'-phosphate
  modified_base 8: mod_base = OTHER; note = 2'-O-methylcytidine-3'-phosphate
  modified_base 9: mod_base = OTHER; note = 2'-deoxy-2'-fluoroadenosine-3'-phosphate
  modified_base 10: mod_base = OTHER; note = 2'-deoxy-2'-fluoroadenosine-3'-phosphate
  modified_base 11: mod_base = OTHER; note = 2'-deoxy-2'-fluoroadenosine-3'-phosphate
  modified_base 12: mod_base = OTHER; note = 2'-O-methyluridine-3'-phosphate
  modified_base 13: mod_base = OTHER; note = 2'-deoxy-2'-fluorouridine-3'-phosphate
  modified_base 14: mod_base = OTHER; note = 2'-O-methyluridine-3'-phosphate
  modified_base 15: mod_base = OTHER; note = 2'-deoxy-2'-fluoroguanosine-3'-phosphate
  modified_base 16: mod_base = OTHER; note = 2'-O-methyladenosine-3'-phosphate
  modified_base 17: mod_base = OTHER; note = 2'-deoxy-2'-fluoroguanosine-3'-phosphate
  modified_base 18: mod_base = OTHER; note = 2'-O-methylguanosine-3'-phosphate
  modified_base 19: mod_base = OTHER; note = 2'-deoxy-2'-fluoroguanosine-3'-phosphate
  modified_base 20: mod_base = OTHER; note = 2'-O-methyladenosine-3'-phosphate
  modified_base 21: mod_base = OTHER; note = 2'-deoxy-2'-fluoroadenosine-3'-phosphate ((2S,4R)-1-[29-[[2-(acetylamino)-2-deoxy-beta-D-galactopyra nosyl]oxy]-14,14-bis[[3-[[3-[[5-[[2-(acetylamino)-2-deoxy-b eta-D-galactopyranosyl]oxy]-1-oxopentyl]amino]propyl]amino] -3-oxopropoxy]methyl]-1,12,19,25-tetraoxo-16-oxa-13,20,24-t riazanonacos-1-yl]-4-hydroxy-2-pyrrolidinyl)methyl ester
gcccattcaaatttgagggaa

SEQ ID NO: 444 - RNA, 21 nt, synthetic construct
  source 1..21: mol_type = other RNA
  modified_base 1: mod_base = OTHER; note = 2'-deoxy-2'-fluorouridine-3'-phosphorothioate
  modified_base 2: mod_base = OTHER; note = 2'-O-methyluridine-3'-phosphorothioate
  modified_base 3: mod_base = OTHER; note = 2'-deoxy-2'-fluorouridine-3'-phosphate
  modified_base 4: mod_base = OTHER; note = 2'-O-methyluridine-3'-phosphate
  modified_base 5: mod_base = OTHER; note = 2'-deoxy-2'-fluoroguanosine-3'-phosphate
  modified_base 6: mod_base = OTHER; note = 2'-O-methylguanosine-3'-phosphate
  modified_base 7: mod_base = OTHER; note = 2'-deoxy-2'-fluoroadenosine-3'-phosphate
  modified_base 8: mod_base = OTHER; note = 2'-O-methyluridine-3'-phosphate
  modified_base 9: mod_base = OTHER; note = 2'-deoxy-2'-fluoroadenosine-3'-phosphate
  modified_base 10: mod_base = OTHER; note = 2'-deoxy-2'-fluoroadenosine-3'-phosphate
  modified_base 11: mod_base = OTHER; note = 2'-deoxy-2'-fluoroadenosine-3'-phosphate
  modified_base 12: mod_base = OTHER; note = 2'-O-methylguanosine-3'-phosphate
  modified_base 13: mod_base = OTHER; note = 2'-deoxy-2'-fluorocytidine-3'-phosphate
  modified_base 14: mod_base = OTHER; note = 2'-O-methyluridine-3'-phosphate
  modified_base 15: mod_base = OTHER; note = 2'-deoxy-2'-fluorouridine-3'-phosphate
  modified_base 16: mod_base = OTHER; note = 2'-O-methylcytidine-3'-phosphate
  modified_base 17: mod_base = OTHER; note = 2'-deoxy-2'-fluorocytidine-3'-phosphate
  modified_base 18: mod_base = OTHER; note = 2'-O-methyladenosine-3'-phosphate
  modified_base 19: mod_base = OTHER; note = 2'-deoxy-2'-fluorouridine-3'-phosphate
  modified_base 20: mod_base = OTHER; note = 2'-O-methylguanosine-3'-phosphate
  modified_base 21: mod_base = OTHER; note = 2'-deoxy-2'-fluoroadenosine-3'-phosphate ((2S,4R)-1-[29-[[2-(acetylamino)-2-deoxy-beta-D-galactopyra nosyl]oxy]-14,14-bis[[3-[[3-[[5-[[2-(acetylamino)-2-deoxy-b eta-D-galactopyranosyl]oxy]-1-oxopentyl]amino]propyl]amino] -3-oxopropoxy]methyl]-1,12,19,25-tetraoxo-16-oxa-13,20,24-t riazanonacos-1-yl]-4-hydroxy-2-pyrrolidinyl)methyl ester
ttttggataaagcttccatga

SEQ ID NO: 445 - RNA, 21 nt, synthetic construct
  source 1..21: mol_type = other RNA
  modified_base 1: mod_base = OTHER; note = 2'-deoxy-2'-fluoroadenosine-3'-phosphorothioate
  modified_base 2: mod_base = OTHER; note = 2'-O-methyladenosine-3'-phosphorothioate
  modified_base 3: mod_base = OTHER; note = 2'-deoxy-2'-fluorocytidine-3'-phosphate
  modified_base 4: mod_base = OTHER; note = 2'-O-methylcytidine-3'-phosphate
  modified_base 5: mod_base = OTHER; note = 2'-deoxy-2'-fluoroadenosine-3'-phosphate
  modified_base 6: mod_base = OTHER; note = 2'-O-methyladenosine-3'-phosphate
  modified_base 7: mod_base = OTHER; note = 2'-deoxy-2'-fluoroadenosine-3'-phosphate
  modified_base 8: mod_base = OTHER; note = 2'-O-methylguanosine-3'-phosphate
  modified_base 9: mod_base = OTHER; note = 2'-deoxy-2'-fluoroguanosine-3'-phosphate
  modified_base 10: mod_base = OTHER; note = 2'-deoxy-2'-fluorocytidine-3'-phosphate
  modified_base 11: mod_base = OTHER; note = 2'-deoxy-2'-fluoroguanosine-3'-phosphate
  modified_base 12: mod_base = OTHER; note = 2'-O-methyladenosine-3'-phosphate
  modified_base 13: mod_base = OTHER; note = 2'-deoxy-2'-fluoroguanosine-3'-phosphate
  modified_base 14: mod_base = OTHER; note = 2'-O-methyladenosine-3'-phosphate
  modified_base 15: mod_base = OTHER; note = 2'-deoxy-2'-fluoroadenosine-3'-phosphate
  modified_base 16: mod_base = OTHER; note = 2'-O-methyladenosine-3'-phosphate
  modified_base 17: mod_base = OTHER; note = 2'-deoxy-2'-fluoroadenosine-3'-phosphate
  modified_base 18: mod_base = OTHER; note = 2'-O-methyladenosine-3'-phosphate
  modified_base 19: mod_base = OTHER; note = 2'-deoxy-2'-fluorouridine-3'-phosphate
  modified_base 20: mod_base = OTHER; note = 2'-O-methyluridine-3'-phosphate
  modified_base 21: mod_base = OTHER; note = 2'-deoxy-2'-fluorouridine-3'-phosphate ((2S,4R)-1-[29-[[2-(acetylamino)-2-deoxy-beta-D-galactopyra nosyl]oxy]-14,14-bis[[3-[[3-[[5-[[2-(acetylamino)-2-deoxy-b eta-D-galactopyranosyl]oxy]-1-oxopentyl]amino]propyl]amino] -3-oxopropoxy]methyl]-1,12,19,25-tetraoxo-16-oxa-13,20,24-t riazanonacos-1-yl]-4-hydroxy-2-pyrrolidinyl)methyl ester
aaccaaaggcgagaaaaattt

SEQ ID NO: 446 - RNA, 21 nt, synthetic construct
  source 1..21: mol_type = other RNA
  modified_base 1: mod_base = OTHER; note = 2'-deoxy-2'-fluorocytidine-3'-phosphorothioate
  modified_base 2: mod_base = OTHER; note = 2'-O-methyluridine-3'-phosphorothioate
  modified_base 3: mod_base = OTHER; note = 2'-deoxy-2'-fluorouridine-3'-phosphate
  modified_base 4: mod_base = OTHER; note = 2'-O-methyluridine-3'-phosphate
  modified_base 5: mod_base = OTHER; note = 2'-deoxy-2'-fluoroguanosine-3'-phosphate
  modified_base 6: mod_base = OTHER; note = 2'-O-methylcytidine-3'-phosphate
  modified_base 7: mod_base = OTHER; note = 2'-deoxy-2'-fluorocytidine-3'-phosphate
  modified_base 8: mod_base = OTHER; note = 2'-O-methyladenosine-3'-phosphate
  modified_base 9: mod_base = OTHER; note = 2'-deoxy-2'-fluoroadenosine-3'-phosphate
  modified_base 10: mod_base = OTHER; note = 2'-deoxy-2'-fluorocytidine-3'-phosphate
  modified_base 11: mod_base = OTHER; note = 2'-deoxy-2'-fluorouridine-3'-phosphate
  modified_base 12: mod_base = OTHER; note = 2'-O-methyladenosine-3'-phosphate
  modified_base 13: mod_base = OTHER; note = 2'-deoxy-2'-fluorocytidine-3'-phosphate
  modified_base 14: mod_base = OTHER; note = 2'-O-methylcytidine-3'-phosphate
  modified_base 15: mod_base = OTHER; note = 2'-deoxy-2'-fluorouridine-3'-phosphate
  modified_base 16: mod_base = OTHER; note = 2'-O-methyladenosine-3'-phosphate
  modified_base 17: mod_base = OTHER; note = 2'-deoxy-2'-fluorouridine-3'-phosphate
  modified_base 18: mod_base = OTHER; note = 2'-O-methylguanosine-3'-phosphate
  modified_base 19: mod_base = OTHER; note = 2'-deoxy-2'-fluoroadenosine-3'-phosphate
  modified_base 20: mod_base = OTHER; note = 2'-O-methyladenosine-3'-phosphate
  modified_base 21: mod_base = OTHER; note = 2'-deoxy-2'-fluoroadenosine-3'-phosphate ((2S,4R)-1-[29-[[2-(acetylamino)-2-deoxy-beta-D-galactopyra nosyl]oxy]-14,14-bis[[3-[[3-[[5-[[2-(acetylamino)-2-deoxy-b eta-D-galactopyranosyl]oxy]-1-oxopentyl]amino]propyl]amino] -3-oxopropoxy]methyl]-1,12,19,25-tetraoxo-16-oxa-13,20,24-t riazanonacos-1-yl]-4-hydroxy-2-pyrrolidinyl)methyl ester
ctttgccaactacctatgaaa

SEQ ID NO: 447 - RNA, 21 nt, synthetic construct
  source 1..21: mol_type = other RNA
  modified_base 1: mod_base = OTHER; note = 2'-deoxy-2'-fluorocytidine-3'-phosphorothioate
  modified_base 2: mod_base = OTHER; note = 2'-O-methyladenosine-3'-phosphorothioate
  modified_base 3: mod_base = OTHER; note = 2'-deoxy-2'-fluorocytidine-3'-phosphate
  modified_base 4: mod_base = OTHER; note = 2'-O-methylcytidine-3'-phosphate
  modified_base 5: mod_base = OTHER; note = 2'-deoxy-2'-fluorouridine-3'-phosphate
  modified_base 6: mod_base = OTHER; note = 2'-O-methyluridine-3'-phosphate
  modified_base 7: mod_base = OTHER; note = 2'-deoxy-2'-fluorouridine-3'-phosphate
  modified_base 8: mod_base = OTHER; note = 2'-O-methyluridine-3'-phosphate
  modified_base 9: mod_base = OTHER; note = 2'-deoxy-2'-fluoroguanosine-3'-phosphate
  modified_base 10: mod_base = OTHER; note = 2'-deoxy-2'-fluoroadenosine-3'-phosphate
  modified_base 11: mod_base = OTHER; note = 2'-deoxy-2'-fluorocytidine-3'-phosphate
  modified_base 12: mod_base = OTHER; note = 2'-O-methyladenosine-3'-phosphate
  modified_base 13: mod_base = OTHER; note = 2'-deoxy-2'-fluoroadenosine-3'-phosphate
  modified_base 14: mod_base = OTHER; note = 2'-O-methyluridine-3'-phosphate
  modified_base 15: mod_base = OTHER; note = 2'-deoxy-2'-fluoroguanosine-3'-phosphate
  modified_base 16: mod_base = OTHER; note = 2'-O-methyladenosine-3'-phosphate
  modified_base 17: mod_base = OTHER; note = 2'-deoxy-2'-fluoroguanosine-3'-phosphate
  modified_base 18: mod_base = OTHER; note = 2'-O-methyluridine-3'-phosphate
  modified_base 19: mod_base = OTHER; note = 2'-deoxy-2'-fluorouridine-3'-phosphate
  modified_base 20: mod_base = OTHER; note = 2'-O-methylcytidine-3'-phosphate
  modified_base 21: mod_base = OTHER; note = 2'-deoxy-2'-fluorouridine-3'-phosphate ((2S,4R)-1-[29-[[2-(acetylamino)-2-deoxy-beta-D-galactopyra nosyl]oxy]-14,14-bis[[3-[[3-[[5-[[2-(acetylamino)-2-deoxy-b eta-D-galactopyranosyl]oxy]-1-oxopentyl]amino]propyl]amino] -3-oxopropoxy]methyl]-1,12,19,25-tetraoxo-16-oxa-13,20,24-t riazanonacos-1-yl]-4-hydroxy-2-pyrrolidinyl)methyl ester
caccttttgacaatgagttct

SEQ ID NO: 448 - RNA, 21 nt, synthetic construct
  source 1..21: mol_type = other RNA
  modified_base 1: mod_base = OTHER; note = 2'-deoxy-2'-fluoroguanosine-3'-phosphorothioate
  modified_base 2: mod_base = OTHER; note = 2'-O-methyladenosine-3'-phosphorothioate
  modified_base 3: mod_base = OTHER; note = 2'-deoxy-2'-fluoroguanosine-3'-phosphate
  modified_base 4: mod_base = OTHER; note = 2'-O-methyladenosine-3'-phosphate
  modified_base 5: mod_base = OTHER; note = 2'-deoxy-2'-fluoroadenosine-3'-phosphate
  modified_base 6: mod_base = OTHER; note = 2'-O-methylguanosine-3'-phosphate
  modified_base 7: mod_base = OTHER; note = 2'-deoxy-2'-fluoroadenosine-3'-phosphate
  modified_base 8: mod_base = OTHER; note = 2'-O-methylcytidine-3'-phosphate
  modified_base 9: mod_base = OTHER; note = 2'-deoxy-2'-fluoroadenosine-3'-phosphate
  modified_base 10: mod_base = OTHER; note = 2'-deoxy-2'-fluorouridine-3'-phosphate
  modified_base 11: mod_base = OTHER; note = 2'-deoxy-2'-fluorocytidine-3'-phosphate
  modified_base 12: mod_base = OTHER; note = 2'-O-methyladenosine-3'-phosphate
  modified_base 13: mod_base = OTHER; note = 2'-deoxy-2'-fluoroadenosine-3'-phosphate
  modified_base 14: mod_base = OTHER; note = 2'-O-methyladenosine-3'-phosphate
  modified_base 15: mod_base = OTHER; note = 2'-deoxy-2'-fluorouridine-3'-phosphate
  modified_base 16: mod_base = OTHER; note = 2'-O-methyluridine-3'-phosphate
  modified_base 17: mod_base = OTHER; note = 2'-deoxy-2'-fluorouridine-3'-phosphate
  modified_base 18: mod_base = OTHER; note = 2'-O-methyluridine-3'-phosphate
  modified_base 19: mod_base = OTHER; note = 2'-deoxy-2'-fluoroadenosine-3'-phosphate
  modified_base 20: mod_base = OTHER; note = 2'-O-methyladenosine-3'-phosphate
  modified_base 21: mod_base = OTHER; note = 2'-deoxy-2'-fluorouridine-3'-phosphate ((2S,4R)-1-[29-[[2-(acetylamino)-2-deoxy-beta-D-galactopyra nosyl]oxy]-14,14-bis[[3-[[3-[[5-[[2-(acetylamino)-2-deoxy-b eta-D-galactopyranosyl]oxy]-1-oxopentyl]amino]propyl]amino] -3-oxopropoxy]methyl]-1,12,19,25-tetraoxo-16-oxa-13,20,24-t riazanonacos-1-yl]-4-hydroxy-2-pyrrolidinyl)methyl ester
gagaagacatcaaattttaat

SEQ ID NO: 449 - RNA, 21 nt, synthetic construct
  source 1..21: mol_type = other RNA
  modified_base 1: mod_base = OTHER; note = 2'-deoxy-2'-fluoroguanosine-3'-phosphorothioate
  modified_base 2: mod_base = OTHER; note = 2'-O-methyladenosine-3'-phosphorothioate
  modified_base 3: mod_base = OTHER; note = 2'-deoxy-2'-fluorocytidine-3'-phosphate
  modified_base 4: mod_base = OTHER; note = 2'-O-methyladenosine-3'-phosphate
  modified_base 5: mod_base = OTHER; note = 2'-deoxy-2'-fluoroadenosine-3'-phosphate
  modified_base 6: mod_base = OTHER; note = 2'-O-methyluridine-3'-phosphate
  modified_base 7: mod_base = OTHER; note = 2'-deoxy-2'-fluoroguanosine-3'-phosphate
  modified_base 8: mod_base = OTHER; note = 2'-O-methyladenosine-3'-phosphate
  modified_base 9: mod_base = OTHER; note = 2'-deoxy-2'-fluoroguanosine-3'-phosphate
  modified_base 10: mod_base = OTHER; note = 2'-deoxy-2'-fluorouridine-3'-phosphate
  modified_base 11: mod_base = OTHER; note = 2'-deoxy-2'-fluorouridine-3'-phosphate
  modified_base 12: mod_base = OTHER; note = 2'-O-methylcytidine-3'-phosphate
  modified_base 13: mod_base = OTHER; note = 2'-deoxy-2'-fluorouridine-3'-phosphate
  modified_base 14: mod_base = OTHER; note = 2'-O-methyladenosine-3'-phosphate
  modified_base 15: mod_base = OTHER; note = 2'-deoxy-2'-fluorocytidine-3'-phosphate
  modified_base 16: mod_base = OTHER; note = 2'-O-methyladenosine-3'-phosphate
  modified_base 17: mod_base = OTHER; note = 2'-deoxy-2'-fluoroadenosine-3'-phosphate
  modified_base 18: mod_base = OTHER; note = 2'-O-methyluridine-3'-phosphate
  modified_base 19: mod_base = OTHER; note = 2'-deoxy-2'-fluoroguanosine-3'-phosphate
  modified_base 20: mod_base = OTHER; note = 2'-O-methylguanosine-3'-phosphate
  modified_base 21: mod_base = OTHER; note = 2'-deoxy-2'-fluoroadenosine-3'-phosphate ((2S,4R)-1-[29-[[2-(acetylamino)-2-deoxy-beta-D-galactopyra nosyl]oxy]-14,14-bis[[3-[[3-[[5-[[2-(acetylamino)-2-deoxy-b eta-D-galactopyranosyl]oxy]-1-oxopentyl]amino]propyl]amino] -3-oxopropoxy]methyl]-1,12,19,25-tetraoxo-16-oxa-13,20,24-t riazanonacos-1-yl]-4-hydroxy-2-pyrrolidinyl)methyl ester
gacaatgagttctacaatgga

SEQ ID NO: 450 - RNA, 21 nt, synthetic construct
  source 1..21: mol_type = other RNA
  modified_base 1: mod_base = OTHER; note = 2'-deoxy-2'-fluorouridine-3'-phosphorothioate
  modified_base 2: mod_base = OTHER; note = 2'-O-methyluridine-3'-phosphorothioate
  modified_base 3: mod_base = OTHER; note = 2'-deoxy-2'-fluorouridine-3'-phosphate
  modified_base 4: mod_base = OTHER; note = 2'-O-methylguanosine-3'-phosphate
  modified_base 5: mod_base = OTHER; note = 2'-deoxy-2'-fluoroguanosine-3'-phosphate
  modified_base 6: mod_base = OTHER; note = 2'-O-methyladenosine-3'-phosphate
  modified_base 7: mod_base = OTHER; note = 2'-deoxy-2'-fluorouridine-3'-phosphate
  modified_base 8: mod_base = OTHER; note = 2'-O-methyladenosine-3'-phosphate
  modified_base 9: mod_base = OTHER; note = 2'-deoxy-2'-fluoroadenosine-3'-phosphate
  modified_base 10: mod_base = OTHER; note = 2'-deoxy-2'-fluoroadenosine-3'-phosphate
  modified_base 11: mod_base = OTHER; note = 2'-deoxy-2'-fluoroguanosine-3'-phosphate
  modified_base 12: mod_base = OTHER; note = 2'-O-methylcytidine-3'-phosphate
  modified_base 13: mod_base = OTHER; note = 2'-deoxy-2'-fluorouridine-3'-phosphate
  modified_base 14: mod_base = OTHER; note = 2'-O-methyluridine-3'-phosphate
  modified_base 15: mod_base = OTHER; note = 2'-deoxy-2'-fluorocytidine-3'-phosphate
  modified_base 16: mod_base = OTHER; note = 2'-O-methylcytidine-3'-phosphate
  modified_base 17: mod_base = OTHER; note = 2'-deoxy-2'-fluoroadenosine-3'-phosphate
  modified_base 18: mod_base = OTHER; note = 2'-O-methyluridine-3'-phosphate
  modified_base 19: mod_base = OTHER; note = 2'-deoxy-2'-fluoroguanosine-3'-phosphate
  modified_base 20: mod_base = OTHER; note = 2'-O-methyladenosine-3'-phosphate
  modified_base 21: mod_base = OTHER; note = 2'-deoxy-2'-fluoroadenosine-3'-phosphate ((2S,4R)-1-[29-[[2-(acetylamino)-2-deoxy-beta-D-galactopyra nosyl]oxy]-14,14-bis[[3-[[3-[[5-[[2-(acetylamino)-2-deoxy-b eta-D-galactopyranosyl]oxy]-1-oxopentyl]amino]propyl]amino] -3-oxopropoxy]methyl]-1,12,19,25-tetraoxo-16-oxa-13,20,24-t riazanonacos-1-yl]-4-hydroxy-2-pyrrolidinyl)methyl ester
tttggataaagcttccatgaa

SEQ ID NO: 451 - RNA, 21 nt, synthetic construct
  source 1..21: mol_type = other RNA
  modified_base 1: mod_base = OTHER; note = 2'-deoxy-2'-fluoroadenosine-3'-phosphorothioate
  modified_base 2: mod_base = OTHER; note = 2'-O-methyluridine-3'-phosphorothioate
  modified_base 3: mod_base = OTHER; note = 2'-deoxy-2'-fluorocytidine-3'-phosphate
  modified_base 4: mod_base = OTHER; note = 2'-O-methyluridine-3'-phosphate
  modified_base 5: mod_base = OTHER; note = 2'-deoxy-2'-fluoroadenosine-3'-phosphate
  modified_base 6: mod_base = OTHER; note = 2'-O-methyluridine-3'-phosphate
  modified_base 7: mod_base = OTHER; note = 2'-deoxy-2'-fluoroguanosine-3'-phosphate
  modified_base 8: mod_base = OTHER; note = 2'-O-methyladenosine-3'-phosphate
  modified_base 9: mod_base = OTHER; note = 2'-deoxy-2'-fluoroadenosine-3'-phosphate
  modified_base 10: mod_base = OTHER; note = 2'-deoxy-2'-fluoroadenosine-3'-phosphate
  modified_base 11: mod_base = OTHER; note = 2'-deoxy-2'-fluorocytidine-3'-phosphate
  modified_base 12: mod_base = OTHER; note = 2'-O-methylcytidine-3'-phosphate
  modified_base 13: mod_base = OTHER; note = 2'-deoxy-2'-fluoroadenosine-3'-phosphate
  modified_base 14: mod_base = OTHER; note = 2'-O-methyladenosine-3'-phosphate
  modified_base 15: mod_base = OTHER; note = 2'-deoxy-2'-fluoroadenosine-3'-phosphate
  modified_base 16: mod_base = OTHER; note = 2'-O-methylguanosine-3'-phosphate
  modified_base 17: mod_base = OTHER; note = 2'-deoxy-2'-fluoroguanosine-3'-phosphate
  modified_base 18: mod_base = OTHER; note = 2'-O-methylcytidine-3'-phosphate
  modified_base 19: mod_base = OTHER; note = 2'-deoxy-2'-fluoroguanosine-3'-phosphate
  modified_base 20: mod_base = OTHER; note = 2'-O-methyladenosine-3'-phosphate
  modified_base 21: mod_base = OTHER; note = 2'-deoxy-2'-fluoroguanosine-3'-phosphate ((2S,4R)-1-[29-[[2-(acetylamino)-2-deoxy-beta-D-galactopyra nosyl]oxy]-14,14-bis[[3-[[3-[[5-[[2-(acetylamino)-2-deoxy-b eta-D-galactopyranosyl]oxy]-1-oxopentyl]amino]propyl]amino] -3-oxopropoxy]methyl]-1,12,19,25-tetraoxo-16-oxa-13,20,24-t riazanonacos-1-yl]-4-hydroxy-2-pyrrolidinyl)methyl ester
atctatgaaaccaaaggcgag

SEQ ID NO: 452 - RNA, 21 nt, synthetic construct
  source 1..21: mol_type = other RNA
  modified_base 1: mod_base = OTHER; note = 2'-deoxy-2'-fluoroadenosine-3'-phosphorothioate
  modified_base 2: mod_base = OTHER; note = 2'-O-methyluridine-3'-phosphorothioate
  modified_base 3: mod_base = OTHER; note = 2'-deoxy-2'-fluoroadenosine-3'-phosphate
  modified_base 4: mod_base = OTHER; note = 2'-O-methyluridine-3'-phosphate
  modified_base 5: mod_base = OTHER; note = 2'-deoxy-2'-fluorocytidine-3'-phosphate
  modified_base 6: mod_base = OTHER; note = 2'-O-methyladenosine-3'-phosphate
  modified_base 7: mod_base = OTHER; note = 2'-deoxy-2'-fluoroadenosine-3'-phosphate
  modified_base 8: mod_base = OTHER; note = 2'-O-methyluridine-3'-phosphate
  modified_base 9: mod_base = OTHER; note = 2'-deoxy-2'-fluoroguanosine-3'-phosphate
  modified_base 10: mod_base = OTHER; note = 2'-deoxy-2'-fluoroadenosine-3'-phosphate
  modified_base 11: mod_base = OTHER; note = 2'-deoxy-2'-fluoroadenosine-3'-phosphate
  modified_base 12: mod_base = OTHER; note = 2'-O-methyluridine-3'-phosphate
  modified_base 13: mod_base = OTHER; note = 2'-deoxy-2'-fluorouridine-3'-phosphate
  modified_base 14: mod_base = OTHER; note = 2'-O-methyluridine-3'-phosphate
  modified_base 15: mod_base = OTHER; note = 2'-deoxy-2'-fluoroadenosine-3'-phosphate
  modified_base 16: mod_base = OTHER; note = 2'-O-methylguanosine-3'-phosphate
  modified_base 17: mod_base = OTHER; note = 2'-deoxy-2'-fluorouridine-3'-phosphate
  modified_base 18: mod_base = OTHER; note = 2'-O-methylguanosine-3'-phosphate
  modified_base 19: mod_base = OTHER; note = 2'-deoxy-2'-fluorouridine-3'-phosphate
  modified_base 20: mod_base = OTHER; note = 2'-O-methyladenosine-3'-phosphate
  modified_base 21: mod_base = OTHER; note = 2'-deoxy-2'-fluoroadenosine-3'-phosphate ((2S,4R)-1-[29-[[2-(acetylamino)-2-deoxy-beta-D-galactopyra nosyl]oxy]-14,14-bis[[3-[[3-[[5-[[2-(acetylamino)-2-deoxy-b eta-D-galactopyranosyl]oxy]-1-oxopentyl]amino]propyl]amino] -3-oxopropoxy]methyl]-1,12,19,25-tetraoxo-16-oxa-13,20,24-t riazanonacos-1-yl]-4-hydroxy-2-pyrrolidinyl)methyl ester
atatcaatgaatttagtgtaa

SEQ ID NO: 453 - RNA, 21 nt, synthetic construct
  source 1..21: mol_type = other RNA
  modified_base 1: mod_base = OTHER; note = 2'-deoxy-2'-fluorocytidine-3'-phosphorothioate
  modified_base 2: mod_base = OTHER; note = 2'-O-methyladenosine-3'-phosphorothioate
  modified_base 3: mod_base = OTHER; note = 2'-deoxy-2'-fluorocytidine-3'-phosphate
  modified_base 4: mod_base = OTHER; note = 2'-O-methyladenosine-3'-phosphate
  modified_base 5: mod_base = OTHER; note = 2'-deoxy-2'-fluorocytidine-3'-phosphate
  modified_base 6: mod_base = OTHER; note = 2'-O-methylcytidine-3'-phosphate
  modified_base 7: mod_base = OTHER; note = 2'-deoxy-2'-fluorouridine-3'-phosphate
  modified_base 8: mod_base = OTHER; note = 2'-O-methyluridine-3'-phosphate
  modified_base 9: mod_base = OTHER; note = 2'-deoxy-2'-fluorouridine-3'-phosphate
  modified_base 10: mod_base = OTHER; note = 2'-deoxy-2'-fluorouridine-3'-phosphate
  modified_base 11: mod_base = OTHER; note = 2'-deoxy-2'-fluoroguanosine-3'-phosphate
  modified_base 12: mod_base = OTHER; note = 2'-O-methyladenosine-3'-phosphate
  modified_base 13: mod_base = OTHER; note = 2'-deoxy-2'-fluorocytidine-3'-phosphate
  modified_base 14: mod_base = OTHER; note = 2'-O-methyladenosine-3'-phosphate
  modified_base 15: mod_base = OTHER; note = 2'-deoxy-2'-fluoroadenosine-3'-phosphate
  modified_base 16: mod_base = OTHER; note = 2'-O-methyluridine-3'-phosphate
  modified_base 17: mod_base = OTHER; note = 2'-deoxy-2'-fluoroguanosine-3'-phosphate
  modified_base 18: mod_base = OTHER; note = 2'-O-methyladenosine-3'-phosphate
  modified_base 19: mod_base = OTHER; note = 2'-deoxy-2'-fluoroguanosine-3'-phosphate
  modified_base 20: mod_base = OTHER; note = 2'-O-methyluridine-3'-phosphate
  modified_base 21: mod_base = OTHER; note = 2'-deoxy-2'-fluorouridine-3'-phosphate ((2S,4R)-1-[29-[[2-(acetylamino)-2-deoxy-beta-D-galactopyra nosyl]oxy]-14,14-bis[[3-[[3-[[5-[[2-(acetylamino)-2-deoxy-b eta-D-galactopyranosyl]oxy]-1-oxopentyl]amino]propyl]amino] -3-oxopropoxy]methyl]-1,12,19,25-tetraoxo-16-oxa-13,20,24-t riazanonacos-1-yl]-4-hydroxy-2-pyrrolidinyl)methyl ester
cacaccttttgacaatgagtt

SEQ ID NO: 454 - RNA, 21 nt, synthetic construct
  source 1..21: mol_type = other RNA
  modified_base 1: mod_base = OTHER; note = 2'-deoxy-2'-fluorouridine-3'-phosphorothioate
  modified_base 2: mod_base = OTHER; note = 2'-O-methyladenosine-3'-phosphorothioate
  modified_base 3: mod_base = OTHER; note = 2'-deoxy-2'-fluoroguanosine-3'-phosphate
  modified_base 4: mod_base = OTHER; note = 2'-O-methylguanosine-3'-phosphate
  modified_base 5: mod_base = OTHER; note = 2'-deoxy-2'-fluoroguanosine-3'-phosphate
  modified_base 6: mod_base = OTHER; note = 2'-O-methyluridine-3'-phosphate
  modified_base 7: mod_base = OTHER; note = 2'-deoxy-2'-fluorocytidine-3'-phosphate
  modified_base 8: mod_base = OTHER; note = 2'-O-methyluridine-3'-phosphate
  modified_base 9: mod_base = OTHER; note = 2'-deoxy-2'-fluoroguanosine-3'-phosphate
  modified_base 10: mod_base = OTHER; note = 2'-deoxy-2'-fluoroadenosine-3'-phosphate
  modified_base 11: mod_base = OTHER; note = 2'-deoxy-2'-fluoroguanosine-3'-phosphate
  modified_base 12: mod_base = OTHER; note = 2'-O-methyladenosine-3'-phosphate
  modified_base 13: mod_base = OTHER; note = 2'-deoxy-2'-fluorocytidine-3'-phosphate
  modified_base 14: mod_base = OTHER; note = 2'-O-methylcytidine-3'-phosphate
  modified_base 15: mod_base = OTHER; note = 2'-deoxy-2'-fluorouridine-3'-phosphate
  modified_base 16: mod_base = OTHER; note = 2'-O-methyluridine-3'-phosphate
  modified_base 17: mod_base = OTHER; note = 2'-deoxy-2'-fluorouridine-3'-phosphate
  modified_base 18: mod_base = OTHER; note = 2'-O-methyluridine-3'-phosphate
  modified_base 19: mod_base = OTHER; note = 2'-deoxy-2'-fluoroguanosine-3'-phosphate
  modified_base 20: mod_base = OTHER; note = 2'-O-methyladenosine-3'-phosphate
  modified_base 21: mod_base = OTHER; note = 2'-deoxy-2'-fluoroadenosine-3'-phosphate ((2S,4R)-1-[29-[[2-(acetylamino)-2-deoxy-beta-D-galactopyra nosyl]oxy]-14,14-bis[[3-[[3-[[5-[[2-(acetylamino)-2-deoxy-b eta-D-galactopyranosyl]oxy]-1-oxopentyl]amino]propyl]amino] -3-oxopropoxy]methyl]-1,12,19,25-tetraoxo-16-oxa-13,20,24-t riazanonacos-1-yl]-4-hydroxy-2-pyrrolidinyl)methyl ester
tagggtctgagaccttttgaa

SEQ ID NO: 455 - RNA, 21 nt, synthetic construct
  source 1..21: mol_type = other RNA
  modified_base 1: mod_base = OTHER; note = 2'-deoxy-2'-fluorocytidine-3'-phosphorothioate
  modified_base 2: mod_base = OTHER; note = 2'-O-methyladenosine-3'-phosphorothioate
  modified_base 3: mod_base = OTHER; note = 2'-deoxy-2'-fluoroadenosine-3'-phosphate
  modified_base 4: mod_base = OTHER; note = 2'-O-methyladenosine-3'-phosphate
  modified_base 5: mod_base = OTHER; note = 2'-deoxy-2'-fluoroadenosine-3'-phosphate
  modified_base 6: mod_base = OTHER; note = 2'-O-methylcytidine-3'-phosphate
  modified_base 7: mod_base = OTHER; note = 2'-deoxy-2'-fluorouridine-3'-phosphate
  modified_base 8: mod_base = OTHER; note = 2'-O-methyluridine-3'-phosphate
  modified_base 9: mod_base = OTHER; note = 2'-deoxy-2'-fluoroguanosine-3'-phosphate
  modified_base 10: mod_base = OTHER; note = 2'-deoxy-2'-fluoroguanosine-3'-phosphate
  modified_base 11: mod_base = OTHER; note = 2'-deoxy-2'-fluoroadenosine-3'-phosphate
  modified_base 12: mod_base = OTHER; note = 2'-O-methyladenosine-3'-phosphate
  modified_base 13: mod_base = OTHER; note = 2'-deoxy-2'-fluoroadenosine-3'-phosphate
  modified_base 14: mod_base = OTHER; note = 2'-O-methylguanosine-3'-phosphate
  modified_base 15: mod_base = OTHER; note = 2'-deoxy-2'-fluoroadenosine-3'-phosphate
  modified_base 16: mod_base = OTHER; note = 2'-O-methylguanosine-3'-phosphate
  modified_base 17: mod_base = OTHER; note = 2'-deoxy-2'-fluorocytidine-3'-phosphate
  modified_base 18: mod_base = OTHER; note = 2'-O-methylcytidine-3'-phosphate
  modified_base 19: mod_base = OTHER; note = 2'-deoxy-2'-fluoroadenosine-3'-phosphate
  modified_base 20: mod_base = OTHER; note = 2'-O-methyluridine-3'-phosphate
  modified_base 21: mod_base = OTHER; note = 2'-deoxy-2'-fluorouridine-3'-phosphate ((2S,4R)-1-[29-[[2-(acetylamino)-2-deoxy-beta-D-galactopyra nosyl]oxy]-14,14-bis[[3-[[3-[[5-[[2-(acetylamino)-2-deoxy-b eta-D-galactopyranosyl]oxy]-1-oxopentyl]amino]propyl]amino] -3-oxopropoxy]methyl]-1,12,19,25-tetraoxo-16-oxa-13,20,24-t riazanonacos-1-yl]-4-hydroxy-2-pyrrolidinyl)methyl ester
caaaacttggaaagagccatt

SEQ ID NO: 456 - RNA, 21 nt, synthetic construct
  source 1..21: mol_type = other RNA
  modified_base 1: mod_base = OTHER; note = 2'-deoxy-2'-fluoroguanosine-3'-phosphorothioate
  modified_base 2: mod_base = OTHER; note = 2'-O-methylcytidine-3'-phosphorothioate
  modified_base 3: mod_base = OTHER; note = 2'-deoxy-2'-fluoroadenosine-3'-phosphate
  modified_base 4: mod_base = OTHER; note = 2'-O-methylcytidine-3'-phosphate
  modified_base 5: mod_base = OTHER; note = 2'-deoxy-2'-fluoroadenosine-3'-phosphate
  modified_base 6: mod_base = OTHER; note = 2'-O-methylcytidine-3'-phosphate
  modified_base 7: mod_base = OTHER; note = 2'-deoxy-2'-fluorocytidine-3'-phosphate
  modified_base 8: mod_base = OTHER; note = 2'-O-methyluridine-3'-phosphate
  modified_base 9: mod_base = OTHER; note = 2'-deoxy-2'-fluorouridine-3'-phosphate
  modified_base 10: mod_base = OTHER; note = 2'-deoxy-2'-fluorouridine-3'-phosphate
  modified_base 11: mod_base = OTHER; note = 2'-deoxy-2'-fluorouridine-3'-phosphate
  modified_base 12: mod_base = OTHER; note = 2'-O-methylguanosine-3'-phosphate
  modified_base 13: mod_base = OTHER; note = 2'-deoxy-2'-fluoroadenosine-3'-phosphate
  modified_base 14: mod_base = OTHER; note = 2'-O-methylcytidine-3'-phosphate
  modified_base 15: mod_base = OTHER; note = 2'-deoxy-2'-fluoroadenosine-3'-phosphate
  modified_base 16: mod_base = OTHER; note = 2'-O-methyladenosine-3'-phosphate
  modified_base 17: mod_base = OTHER; note = 2'-deoxy-2'-fluorouridine-3'-phosphate
  modified_base 18: mod_base = OTHER; note = 2'-O-methylguanosine-3'-phosphate
  modified_base 19: mod_base = OTHER; note = 2'-deoxy-2'-fluoroadenosine-3'-phosphate
  modified_base 20: mod_base = OTHER; note = 2'-O-methylguanosine-3'-phosphate
  modified_base 21: mod_base = OTHER; note = 2'-deoxy-2'-fluorouridine-3'-phosphate ((2S,4R)-1-[29-[[2-(acetylamino)-2-deoxy-beta-D-galactopyra nosyl]oxy]-14,14-bis[[3-[[3-[[5-[[2-(acetylamino)-2-deoxy-b eta-D-galactopyranosyl]oxy]-1-oxopentyl]amino]propyl]amino] -3-oxopropoxy]methyl]-1,12,19,25-tetraoxo-16-oxa-13,20,24-t riazanonacos-1-yl]-4-hydroxy-2-pyrrolidinyl)methyl ester
gcacaccttttgacaatgagt

SEQ ID NO: 457 - RNA, 21 nt, synthetic construct
  source 1..21: mol_type = other RNA
  modified_base 1: mod_base = OTHER; note = 2'-deoxy-2'-fluorouridine-3'-phosphorothioate
  modified_base 2: mod_base = OTHER; note = 2'-O-methylguanosine-3'-phosphorothioate
  modified_base 3: mod_base = OTHER; note = 2'-deoxy-2'-fluoroadenosine-3'-phosphate
  modified_base 4: mod_base = OTHER; note = 2'-O-methyladenosine-3'-phosphate
  modified_base 5: mod_base = OTHER; note = 2'-deoxy-2'-fluoroadenosine-3'-phosphate
  modified_base 6: mod_base = OTHER; note = 2'-O-methylcytidine-3'-phosphate
  modified_base 7: mod_base = OTHER; note = 2'-deoxy-2'-fluorocytidine-3'-phosphate
  modified_base 8: mod_base = OTHER; note = 2'-O-methyladenosine-3'-phosphate
  modified_base 9: mod_base = OTHER; note = 2'-deoxy-2'-fluoroadenosine-3'-phosphate
  modified_base 10: mod_base = OTHER; note = 2'-deoxy-2'-fluoroadenosine-3'-phosphate
  modified_base 11: mod_base = OTHER; note = 2'-deoxy-2'-fluoroguanosine-3'-phosphate
  modified_base 12: mod_base = OTHER; note = 2'-O-methylguanosine-3'-phosphate
  modified_base 13: mod_base = OTHER; note = 2'-deoxy-2'-fluorocytidine-3'-phosphate
  modified_base 14: mod_base = OTHER; note = 2'-O-methylguanosine-3'-phosphate
  modified_base 15: mod_base = OTHER; note = 2'-deoxy-2'-fluoroadenosine-3'-phosphate
  modified_base 16: mod_base = OTHER; note = 2'-O-methylguanosine-3'-phosphate
  modified_base 17: mod_base = OTHER; note = 2'-deoxy-2'-fluoroadenosine-3'-phosphate
  modified_base 18: mod_base = OTHER; note = 2'-O-methyladenosine-3'-phosphate
  modified_base 19: mod_base = OTHER; note = 2'-deoxy-2'-fluoroadenosine-3'-phosphate
  modified_base 20: mod_base = OTHER; note = 2'-O-methyladenosine-3'-phosphate
  modified_base 21: mod_base = OTHER; note = 2'-deoxy-2'-fluoroadenosine-3'-phosphate ((2S,4R)-1-[29-[[2-(acetylamino)-2-deoxy-beta-D-galactopyra nosyl]oxy]-14,14-bis[[3-[[3-[[5-[[2-(acetylamino)-2-deoxy-b eta-D-galactopyranosyl]oxy]-1-oxopentyl]amino]propyl]amino] -3-oxopropoxy]methyl]-1,12,19,25-tetraoxo-16-oxa-13,20,24-t riazanonacos-1-yl]-4-hydroxy-2-pyrrolidinyl)methyl ester
tgaaaccaaaggcgagaaaaa

SEQ ID NO: 458 - RNA, 23 nt, synthetic construct
  source 1..23: mol_type = other RNA
  modified_base 1: mod_base = OTHER; note = 2'-O-methyluridine-3'-phosphorothioate
  modified_base 2: mod_base = OTHER; note = 2'-deoxy-2'-fluorouridine-3'-phosphorothioate
  modified_base 3: mod_base = OTHER; note = 2'-O-methylguanosine-3'-phosphate
  modified_base 4: mod_base = OTHER; note = 2'-deoxy-2'-fluorouridine-3'-phosphate
  modified_base 5: mod_base = OTHER; note = 2'-O-methyladenosine-3'-phosphate
  modified_base 6: mod_base = OTHER; note = 2'-deoxy-2'-fluoroguanosine-3'-phosphate
  modified_base 7: mod_base = OTHER; note = 2'-O-methyladenosine-3'-phosphate
  modified_base 8: mod_base = OTHER; note = 2'-deoxy-2'-fluoroadenosine-3'-phosphate
  modified_base 9: mod_base = OTHER; note = 2'-O-methylcytidine-3'-phosphate
  modified_base 10: mod_base = OTHER; note = 2'-deoxy-2'-fluorouridine-3'-phosphate
  modified_base 11: mod_base = OTHER; note = 2'-O-methylcytidine-3'-phosphate
  modified_base 12: mod_base = OTHER; note = 2'-O-methyladenosine-3'-phosphate
  modified_base 13: mod_base = OTHER; note = 2'-O-methyluridine-3'-phosphate
  modified_base 14: mod_base = OTHER; note = 2'-deoxy-2'-fluorouridine-3'-phosphate
  modified_base 15: mod_base = OTHER; note = 2'-O-methylguanosine-3'-phosphate
  modified_base 16: mod_base = OTHER; note = 2'-deoxy-2'-fluorouridine-3'-phosphate
  modified_base 17: mod_base = OTHER; note = 2'-O-methylcytidine-3'-phosphate
  modified_base 18: mod_base = OTHER; note = 2'-deoxy-2'-fluoroadenosine-3'-phosphate
  modified_base 19: mod_base = OTHER; note = 2'-O-methyladenosine-3'-phosphate
  modified_base 20: mod_base = OTHER; note = 2'-deoxy-2'-fluoroadenosine-3'-phosphate
  modified_base 21: mod_base = OTHER; note = 2'-O-methyladenosine-3'-phosphorothioate
  modified_base 22: mod_base = OTHER; note = 2'-O-methylguanosine-3'-phosphorothioate
  modified_base 23: mod_base = OTHER; note = 2'-O-methylguanosine
ttgtagaactcattgtcaaaagg

SEQ ID NO: 459 - RNA, 23 nt, synthetic construct
  source 1..23: mol_type = other RNA
  modified_base 1: mod_base = OTHER; note = 2'-O-methyluridine-3'-phosphorothioate
  modified_base 2: mod_base = OTHER; note = 2'-deoxy-2'-fluorocytidine-3'-phosphorothioate
  modified_base 3: mod_base = OTHER; note = 2'-O-methyluridine-3'-phosphate
  modified_base 4: mod_base = OTHER; note = 2'-deoxy-2'-fluorouridine-3'-phosphate
  modified_base 5: mod_base = OTHER; note = 2'-O-methyladenosine-3'-phosphate
  modified_base 6: mod_base = OTHER; note = 2'-deoxy-2'-fluorocytidine-3'-phosphate
  modified_base 7: mod_base = OTHER; note = 2'-O-methyladenosine-3'-phosphate
  modified_base 8: mod_base = OTHER; note = 2'-deoxy-2'-fluorocytidine-3'-phosphate
  modified_base 9: mod_base = OTHER; note = 2'-O-methyluridine-3'-phosphate
  modified_base 10: mod_base = OTHER; note = 2'-deoxy-2'-fluoroadenosine-3'-phosphate
  modified_base 11: mod_base = OTHER; note = 2'-O-methyladenosine-3'-phosphate
  modified_base 12: mod_base = OTHER; note = 2'-O-methyladenosine-3'-phosphate
  modified_base 13: mod_base = OTHER; note = 2'-O-methyluridine-3'-phosphate
  modified_base 14: mod_base = OTHER; note = 2'-deoxy-2'-fluorouridine-3'-phosphate
  modified_base 15: mod_base = OTHER; note = 2'-O-methylcytidine-3'-phosphate
  modified_base 16: mod_base = OTHER; note = 2'-deoxy-2'-fluoroadenosine-3'-phosphate
  modified_base 17: mod_base = OTHER; note = 2'-O-methyluridine-3'-phosphate
  modified_base 18: mod_base = OTHER; note = 2'-deoxy-2'-fluorouridine-3'-phosphate
  modified_base 19: mod_base = OTHER; note = 2'-O-methylguanosine-3'-phosphate
  modified_base 20: mod_base = OTHER; note = 2'-deoxy-2'-fluoroadenosine-3'-phosphate
  modified_base 21: mod_base = OTHER; note = 2'-O-methyluridine-3'-phosphorothioate
  modified_base 22: mod_base = OTHER; note = 2'-O-methyladenosine-3'-phosphorothioate
  modified_base 23: mod_base = OTHER; note = 2'-O-methyluridine
tcttacactaaattcattgatat

SEQ ID NO: 460 - RNA, 23 nt, synthetic construct
  source 1..23: mol_type = other RNA
  modified_base 1: mod_base = OTHER; note = 2'-O-methyluridine-3'-phosphorothioate
  modified_base 2: mod_base = OTHER; note = 2'-deoxy-2'-fluorocytidine-3'-phosphorothioate
  modified_base 3: mod_base = OTHER; note = 2'-O-methyluridine-3'-phosphate
  modified_base 4: mod_base = OTHER; note = 2'-deoxy-2'-fluorouridine-3'-phosphate
  modified_base 5: mod_base = OTHER; note = 2'-O-methylguanosine-3'-phosphate
  modified_base 6: mod_base = OTHER; note = 2'-deoxy-2'-fluoroadenosine-3'-phosphate
  modified_base 7: mod_base = OTHER; note = 2'-O-methyladenosine-3'-phosphate
  modified_base 8: mod_base = OTHER; note = 2'-deoxy-2'-fluorocytidine-3'-phosphate
  modified_base 9: mod_base = OTHER; note = 2'-O-methylguanosine-3'-phosphate
  modified_base 10: mod_base = OTHER; note = 2'-deoxy-2'-fluoroadenosine-3'-phosphate
  modified_base 11: mod_base = OTHER; note = 2'-O-methyladenosine-3'-phosphate
  modified_base 12: mod_base = OTHER; note = 2'-O-methyladenosine-3'-phosphate
  modified_base 13: mod_base = OTHER; note = 2'-O-methylcytidine-3'-phosphate
  modified_base 14: mod_base = OTHER; note = 2'-deoxy-2'-fluoroadenosine-3'-phosphate
  modified_base 15: mod_base = OTHER; note = 2'-O-methyluridine-3'-phosphate
  modified_base 16: mod_base = OTHER; note = 2'-deoxy-2'-fluorouridine-3'-phosphate
  modified_base 17: mod_base = OTHER; note = 2'-O-methyluridine-3'-phosphate
  modified_base 18: mod_base = OTHER; note = 2'-deoxy-2'-fluoroguanosine-3'-phosphate
  modified_base 19: mod_base = OTHER; note = 2'-O-methyluridine-3'-phosphate
  modified_base 20: mod_base = OTHER; note = 2'-deoxy-2'-fluorocytidine-3'-phosphate
  modified_base 21: mod_base = OTHER; note = 2'-O-methyluridine-3'-phosphorothioate
  modified_base 22: mod_base = OTHER; note = 2'-O-methylguanosine-3'-phosphorothioate
  modified_base 23: mod_base = OTHER; note = 2'-O-methyladenosine
tcttgaacgaaacatttgtctga

SEQ ID NO: 461 - RNA, 23 nt, synthetic construct
  source 1..23: mol_type = other RNA
  modified_base 1: mod_base = OTHER; note = 2'-O-methyluridine-3'-phosphorothioate
  modified_base 2: mod_base = OTHER; note = 2'-deoxy-2'-fluoroguanosine-3'-phosphorothioate
  modified_base 3: mod_base = OTHER; note = 2'-O-methyluridine-3'-phosphate
  modified_base 4: mod_base = OTHER; note = 2'-deoxy-2'-fluoroadenosine-3'-phosphate
  modified_base 5: mod_base = OTHER; note = 2'-O-methylguanosine-3'-phosphate
  modified_base 6: mod_base = OTHER; note = 2'-deoxy-2'-fluoroadenosine-3'-phosphate
  modified_base 7: mod_base = OTHER; note = 2'-O-methyladenosine-3'-phosphate
  modified_base 8: mod_base = OTHER; note = 2'-deoxy-2'-fluorocytidine-3'-phosphate
  modified_base 9: mod_base = OTHER; note = 2'-O-methyluridine-3'-phosphate
  modified_base 10: mod_base = OTHER; note = 2'-deoxy-2'-fluorocytidine-3'-phosphate
  modified_base 11: mod_base = OTHER; note = 2'-O-methyladenosine-3'-phosphate
  modified_base 12: mod_base = OTHER; note = 2'-O-methyluridine-3'-phosphate
  modified_base 13: mod_base = OTHER; note = 2'-O-methyluridine-3'-phosphate
  modified_base 14: mod_base = OTHER; note = 2'-deoxy-2'-fluoroguanosine-3'-phosphate
  modified_base 15: mod_base = OTHER; note = 2'-O-methyluridine-3'-phosphate
  modified_base 16: mod_base = OTHER; note = 2'-deoxy-2'-fluorocytidine-3'-phosphate
  modified_base 17: mod_base = OTHER; note = 2'-O-methyladenosine-3'-phosphate
  modified_base 18: mod_base = OTHER; note = 2'-deoxy-2'-fluoroadenosine-3'-phosphate
  modified_base 19: mod_base = OTHER; note = 2'-O-methyladenosine-3'-phosphate
  modified_base 20: mod_base = OTHER; note = 2'-deoxy-2'-fluoroadenosine-3'-phosphate
  modified_base 21: mod_base = OTHER; note = 2'-O-methylguanosine-3'-phosphorothioate
  modified_base 22: mod_base = OTHER; note = 2'-O-methylguanosine-3'-phosphorothioate
  modified_base 23: mod_base = OTHER; note = 2'-O-methyluridine
tgtagaactcattgtcaaaaggt

SEQ ID NO: 462 - RNA, 23 nt, synthetic construct
  source 1..23: mol_type = other RNA
  modified_base 1: mod_base = OTHER; note = 2'-O-methyluridine-3'-phosphorothioate
  modified_base 2: mod_base = OTHER; note = 2'-deoxy-2'-fluorouridine-3'-phosphorothioate
  modified_base 3: mod_base = OTHER; note = 2'-O-methylcytidine-3'-phosphate
  modified_base 4: mod_base = OTHER; note = 2'-deoxy-2'-fluoroadenosine-3'-phosphate
  modified_base 5: mod_base = OTHER; note = 2'-O-methyladenosine-3'-phosphate
  modified_base 6: mod_base = OTHER; note = 2'-deoxy-2'-fluorouridine-3'-phosphate
  modified_base 7: mod_base = OTHER; note = 2'-O-methylguanosine-3'-phosphate
  modified_base 8: mod_base = OTHER; note = 2'-deoxy-2'-fluoroguanosine-3'-phosphate
  modified_base 9: mod_base = OTHER; note = 2'-O-methylcytidine-3'-phosphate
  modified_base 10: mod_base = OTHER; note = 2'-deoxy-2'-fluorouridine-3'-phosphate
  modified_base 11: mod_base = OTHER; note = 2'-O-methylcytidine-3'-phosphate
  modified_base 12: mod_base = OTHER; note = 2'-O-methyluridine-3'-phosphate
  modified_base 13: mod_base = OTHER; note = 2'-O-methyluridine-3'-phosphate
  modified_base 14: mod_base = OTHER; note = 2'-deoxy-2'-fluorouridine-3'-phosphate
  modified_base 15: mod_base = OTHER; note = 2'-O-methylcytidine-3'-phosphate
  modified_base 16: mod_base = OTHER; note = 2'-deoxy-2'-fluorocytidine-3'-phosphate
  modified_base 17: mod_base = OTHER; note = 2'-O-methyladenosine-3'-phosphate
  modified_base 18: mod_base = OTHER; note = 2'-deoxy-2'-fluoroadenosine-3'-phosphate
  modified_base 19: mod_base = OTHER; note = 2'-O-methylguanosine-3'-phosphate
  modified_base 20: mod_base = OTHER; note = 2'-deoxy-2'-fluorouridine-3'-phosphate
  modified_base 21: mod_base = OTHER; note = 2'-O-methyluridine-3'-phosphorothioate
  modified_base 22: mod_base = OTHER; note = 2'-O-methyluridine-3'-phosphorothioate
  modified_base 23: mod_base = OTHER; note = 2'-O-methyluridine
ttcaatggctctttccaagtttt

SEQ ID NO: 463 - RNA, 23 nt, synthetic construct
  source 1..23: mol_type = other RNA
  modified_base 1: mod_base = OTHER; note = 2'-O-methyluridine-3'-phosphorothioate
  modified_base 2: mod_base = OTHER; note = 2'-deoxy-2'-fluoroguanosine-3'-phosphorothioate
  modified_base 3: mod_base = OTHER; note = 2'-O-methyluridine-3'-phosphate
  modified_base 4: mod_base = OTHER; note = 2'-deoxy-2'-fluorouridine-3'-phosphate
  modified_base 5: mod_base = OTHER; note = 2'-O-methyladenosine-3'-phosphate
  modified_base 6: mod_base = OTHER; note = 2'-deoxy-2'-fluoroadenosine-3'-phosphate
  modified_base 7: mod_base = OTHER; note = 2'-O-methyluridine-3'-phosphate
  modified_base 8: mod_base = OTHER; note = 2'-deoxy-2'-fluorocytidine-3'-phosphate
  modified_base 9: mod_base = OTHER; note = 2'-O-methyladenosine-3'-phosphate
  modified_base 10: mod_base = OTHER; note = 2'-deoxy-2'-fluoroguanosine-3'-phosphate
  modified_base 11: mod_base = OTHER; note = 2'-O-methylcytidine-3'-phosphate
  modified_base 12: mod_base = OTHER; note = 2'-O-methyluridine-3'-phosphate
  modified_base 13: mod_base = OTHER; note = 2'-O-methyluridine-3'-phosphate
  modified_base 14: mod_base = OTHER; note = 2'-deoxy-2'-fluorocytidine-3'-phosphate
  modified_base 15: mod_base = OTHER; note = 2'-O-methyluridine-3'-phosphate
  modified_base 16: mod_base = OTHER; note = 2'-deoxy-2'-fluorocytidine-3'-phosphate
  modified_base 17: mod_base = OTHER; note = 2'-O-methyladenosine-3'-phosphate
  modified_base 18: mod_base = OTHER; note = 2'-deoxy-2'-fluoroguanosine-3'-phosphate
  modified_base 19: mod_base = OTHER; note = 2'-O-methylguanosine-3'-phosphate
  modified_base 20: mod_base = OTHER; note = 2'-deoxy-2'-fluorouridine-3'-phosphate
  modified_base 21: mod_base = OTHER; note = 2'-O-methyladenosine-3'-phosphorothioate
  modified_base 22: mod_base = OTHER; note = 2'-O-methylguanosine-3'-phosphorothioate
  modified_base 23: mod_base = OTHER; note = 2'-O-methylguanosine
tgttaatcagcttctcaggtagg

SEQ ID NO: 464 - RNA, 23 nt, synthetic construct
  source 1..23: mol_type = other RNA
  modified_base 1: mod_base = OTHER; note = 2'-O-methyluridine-3'-phosphorothioate
  modified_base 2: mod_base = OTHER; note = 2'-deoxy-2'-fluoroadenosine-3'-phosphorothioate
  modified_base 3: mod_base = OTHER; note = 2'-O-methylguanosine-3'-phosphate
  modified_base 4: mod_base = OTHER; note = 2'-deoxy-2'-fluoroadenosine-3'-phosphate
  modified_base 5: mod_base = OTHER; note = 2'-O-methyladenosine-3'-phosphate
  modified_base 6: mod_base = OTHER; note = 2'-deoxy-2'-fluorocytidine-3'-phosphate
  modified_base 7: mod_base = OTHER; note = 2'-O-methyluridine-3'-phosphate
  modified_base 8: mod_base = OTHER; note = 2'-deoxy-2'-fluorocytidine-3'-phosphate
  modified_base 9: mod_base = OTHER; note = 2'-O-methyladenosine-3'-phosphate
  modified_base 10: mod_base = OTHER; note = 2'-deoxy-2'-fluorouridine-3'-phosphate
  modified_base 11: mod_base = OTHER; note = 2'-O-methyluridine-3'-phosphate
  modified_base 12: mod_base = OTHER; note = 2'-O-methylguanosine-3'-phosphate
  modified_base 13: mod_base = OTHER; note = 2'-O-methyluridine-3'-phosphate
  modified_base 14: mod_base = OTHER; note = 2'-deoxy-2'-fluorocytidine-3'-phosphate
  modified_base 15: mod_base = OTHER; note = 2'-O-methyladenosine-3'-phosphate
  modified_base 16: mod_base = OTHER; note = 2'-deoxy-2'-fluoroadenosine-3'-phosphate
  modified_base 17: mod_base = OTHER; note = 2'-O-methyladenosine-3'-phosphate
  modified_base 18: mod_base = OTHER; note = 2'-deoxy-2'-fluoroadenosine-3'-phosphate
  modified_base 19: mod_base = OTHER; note = 2'-O-methylguanosine-3'-phosphate
  modified_base 20: mod_base = OTHER; note = 2'-deoxy-2'-fluoroguanosine-3'-phosphate
  modified_base 21: mod_base = OTHER; note = 2'-O-methyluridine-3'-phosphorothioate
  modified_base 22: mod_base = OTHER; note = 2'-O-methylguanosine-3'-phosphorothioate
  modified_base 23: mod_base = OTHER; note = 2'-O-methyluridine
tagaactcattgtcaaaaggtgt

SEQ ID NO: 465 - RNA, 23 nt, synthetic construct
  source 1..23: mol_type = other RNA
  modified_base 1: mod_base = OTHER; note = 2'-O-methyluridine-3'-phosphorothioate
  modified_base 2: mod_base = OTHER; note = 2'-deoxy-2'-fluorouridine-3'-phosphorothioate
  modified_base 3: mod_base = OTHER; note = 2'-O-methylguanosine-3'-phosphate
  modified_base 4: mod_base = OTHER; note = 2'-deoxy-2'-fluoroadenosine-3'-phosphate
  modified_base 5: mod_base = OTHER; note = 2'-O-methyladenosine-3'-phosphate
  modified_base 6: mod_base = OTHER; note = 2'-deoxy-2'-fluoroadenosine-3'-phosphate
  modified_base 7: mod_base = OTHER; note = 2'-O-methylguanosine-3'-phosphate
  modified_base 8: mod_base = OTHER; note = 2'-deoxy-2'-fluorouridine-3'-phosphate
  modified_base 9: mod_base = OTHER; note = 2'-O-methylcytidine-3'-phosphate
  modified_base 10: mod_base = OTHER; note = 2'-deoxy-2'-fluoroadenosine-3'-phosphate
  modified_base 11: mod_base = OTHER; note = 2'-O-methyluridine-3'-phosphate
  modified_base 12: mod_base = OTHER; note = 2'-O-methyluridine-3'-phosphate
  modified_base 13: mod_base = OTHER; note = 2'-O-methyluridine-3'-phosphate
  modified_base 14: mod_base = OTHER; note = 2'-deoxy-2'-fluorocytidine-3'-phosphate
  modified_base 15: mod_base = OTHER; note = 2'-O-methylcytidine-3'-phosphate
  modified_base 16: mod_base = OTHER; note = 2'-deoxy-2'-fluoroguanosine-3'-phosphate
  modified_base 17: mod_base = OTHER; note = 2'-O-methylcytidine-3'-phosphate
  modified_base 18: mod_base = OTHER; note = 2'-deoxy-2'-fluoroadenosine-3'-phosphate
  modified_base 19: mod_base = OTHER; note = 2'-O-methylguanosine-3'-phosphate
  modified_base 20: mod_base = OTHER; note = 2'-deoxy-2'-fluorouridine-3'-phosphate
  modified_base 21: mod_base = OTHER; note = 2'-O-methylcytidine-3'-phosphorothioate
  modified_base 22: mod_base = OTHER; note = 2'-O-methyladenosine-3'-phosphorothioate
  modified_base 23: mod_base = OTHER; note = 2'-O-methyluridine
ttgaaagtcatttccgcagtcat

SEQ ID NO: 466 - RNA, 23 nt, synthetic construct
  source 1..23: mol_type = other RNA
  modified_base 1: mod_base = OTHER; note = 2'-O-methyluridine-3'-phosphorothioate
  modified_base 2: mod_base = OTHER; note = 2'-deoxy-2'-fluorouridine-3'-phosphorothioate
  modified_base 3: mod_base = OTHER; note = 2'-O-methylcytidine-3'-phosphate
  modified_base 4: mod_base = OTHER; note = 2'-deoxy-2'-fluorocytidine-3'-phosphate
  modified_base 5: mod_base = OTHER; note = 2'-O-methylcytidine-3'-phosphate
  modified_base 6: mod_base = OTHER; note = 2'-deoxy-2'-fluorouridine-3'-phosphate
  modified_base 7: mod_base = OTHER; note = 2'-O-methylcytidine-3'-phosphate
  modified_base 8: mod_base = OTHER; note = 2'-deoxy-2'-fluoroadenosine-3'-phosphate
  modified_base 9: mod_base = OTHER; note = 2'-O-methyladenosine-3'-phosphate
  modified_base 10: mod_base = OTHER; note = 2'-deoxy-2'-fluoroadenosine-3'-phosphate
  modified_base 11: mod_base = OTHER; note = 2'-O-methyluridine-3'-phosphate
  modified_base 12: mod_base = OTHER; note = 2'-O-methyluridine-3'-phosphate
  modified_base 13: mod_base = OTHER; note = 2'-O-methyluridine-3'-phosphate
  modified_base 14: mod_base = OTHER; note = 2'-deoxy-2'-fluoroguanosine-3'-phosphate
  modified_base 15: mod_base = OTHER; note = 2'-O-methyladenosine-3'-phosphate
  modified_base 16: mod_base = OTHER; note = 2'-deoxy-2'-fluoroadenosine-3'-phosphate
  modified_base 17: mod_base = OTHER; note = 2'-O-methyluridine-3'-phosphate
  modified_base 18: mod_base = OTHER; note = 2'-deoxy-2'-fluoroguanosine-3'-phosphate
  modified_base 19: mod_base = OTHER; note = 2'-O-methylguanosine-3'-phosphate
  modified_base 20: mod_base = OTHER; note = 2'-deoxy-2'-fluoroguanosine-3'-phosphate
  modified_base 21: mod_base = OTHER; note = 2'-O-methylcytidine-3'-phosphorothioate
  modified_base 22: mod_base = OTHER; note = 2'-O-methyladenosine-3'-phosphorothioate
  modified_base 23: mod_base = OTHER; note = 2'-O-methylguanosine
ttccctcaaatttgaatgggcag

SEQ ID NO: 467 - RNA, 23 nt, synthetic construct
  source 1..23: mol_type = other RNA
  modified_base 1: mod_base = OTHER; note = 2'-O-methyluridine-3'-phosphorothioate
  modified_base 2: mod_base = OTHER; note = 2'-deoxy-2'-fluorocytidine-3'-phosphorothioate
  modified_base 3: mod_base = OTHER; note = 2'-O-methyladenosine-3'-phosphate
  modified_base 4: mod_base = OTHER; note = 2'-deoxy-2'-fluorouridine-3'-phosphate
  modified_base 5: mod_base = OTHER; note = 2'-O-methylguanosine-3'-phosphate
  modified_base 6: mod_base = OTHER; note = 2'-deoxy-2'-fluoroguanosine-3'-phosphate
  modified_base 7: mod_base = OTHER; note = 2'-O-methyladenosine-3'-phosphate
  modified_base 8: mod_base = OTHER; note = 2'-deoxy-2'-fluoroadenosine-3'-phosphate
  modified_base 9: mod_base = OTHER; note = 2'-O-methylguanosine-3'-phosphate
  modified_base 10: mod_base = OTHER; note = 2'-deoxy-2'-fluorocytidine-3'-phosphate
  modified_base 11: mod_base = OTHER; note = 2'-O-methyluridine-3'-phosphate
  modified_base 12: mod_base = OTHER; note = 2'-O-methyluridine-3'-phosphate
  modified_base 13: mod_base = OTHER; note = 2'-O-methyluridine-3'-phosphate
  modified_base 14: mod_base = OTHER; note = 2'-deoxy-2'-fluoroadenosine-3'-phosphate
  modified_base 15: mod_base = OTHER; note = 2'-O-methyluridine-3'-phosphate
  modified_base 16: mod_base = OTHER; note = 2'-deoxy-2'-fluorocytidine-3'-phosphate
  modified_base 17: mod_base = OTHER; note = 2'-O-methylcytidine-3'-phosphate
  modified_base 18: mod_base = OTHER; note = 2'-deoxy-2'-fluoroadenosine-3'-phosphate
  modified_base 19: mod_base = OTHER; note = 2'-O-methyladenosine-3'-phosphate
  modified_base 20: mod_base = OTHER; note = 2'-deoxy-2'-fluoroadenosine-3'-phosphate
  modified_base 21: mod_base = OTHER; note = 2'-O-methyladenosine-3'-phosphorothioate
  modified_base 22: mod_base = OTHER; note = 2'-O-methylcytidine-3'-phosphorothioate
  modified_base 23: mod_base = OTHER; note = 2'-O-methyladenosine
tcatggaagctttatccaaaaca

SEQ ID NO: 468 - RNA, 23 nt, synthetic construct
  source 1..23: mol_type = other RNA
  modified_base 1: mod_base = OTHER; note = 2'-O-methyladenosine-3'-phosphorothioate
  modified_base 2: mod_base = OTHER; note = 2'-deoxy-2'-fluoroadenosine-3'-phosphorothioate
  modified_base 3: mod_base = OTHER; note = 2'-O-methyladenosine-3'-phosphate
  modified_base 4: mod_base = OTHER; note = 2'-deoxy-2'-fluorouridine-3'-phosphate
  modified_base 5: mod_base = OTHER; note = 2'-O-methyluridine-3'-phosphate
  modified_base 6: mod_base = OTHER; note = 2'-deoxy-2'-fluorouridine-3'-phosphate
  modified_base 7: mod_base = OTHER; note = 2'-O-methyluridine-3'-phosphate
  modified_base 8: mod_base = OTHER; note = 2'-deoxy-2'-fluorouridine-3'-phosphate
  modified_base 9: mod_base = OTHER; note = 2'-O-methylcytidine-3'-phosphate
  modified_base 10: mod_base = OTHER; note = 2'-deoxy-2'-fluorouridine-3'-phosphate
  modified_base 11: mod_base = OTHER; note = 2'-O-methylcytidine-3'-phosphate
  modified_base 12: mod_base = OTHER; note = 2'-O-methylguanosine-3'-phosphate
  modified_base 13: mod_base = OTHER; note = 2'-O-methylcytidine-3'-phosphate
  modified_base 14: mod_base = OTHER; note = 2'-deoxy-2'-fluorocytidine-3'-phosphate
  modified_base 15: mod_base = OTHER; note = 2'-O-methyluridine-3'-phosphate
  modified_base 16: mod_base = OTHER; note = 2'-deoxy-2'-fluorouridine-3'-phosphate
  modified_base 17: mod_base = OTHER; note = 2'-O-methyluridine-3'-phosphate
  modified_base 18: mod_base = OTHER; note = 2'-deoxy-2'-fluoroguanosine-3'-phosphate
  modified_base 19: mod_base = OTHER; note = 2'-O-methylguanosine-3'-phosphate
  modified_base 20: mod_base = OTHER; note = 2'-deoxy-2'-fluorouridine-3'-phosphate
  modified_base 21: mod_base = OTHER; note = 2'-O-methyluridine-3'-phosphorothioate
  modified_base 22: mod_base = OTHER; note = 2'-O-methyluridine-3'-phosphorothioate
  modified_base 23: mod_base = OTHER; note = 2'-O-methylcytidine
aaatttttctcgcctttggtttc

SEQ ID NO: 469 - RNA, 23 nt, synthetic construct
  source 1..23: mol_type = other RNA
  modified_base 1: mod_base = OTHER; note = 2'-O-methyluridine-3'-phosphorothioate
  modified_base 2: mod_base = OTHER; note = 2'-deoxy-2'-fluorouridine-3'-phosphorothioate
  modified_base 3: mod_base = OTHER; note = 2'-O-methyluridine-3'-phosphate
  modified_base 4: mod_base = OTHER; note = 2'-deoxy-2'-fluorocytidine-3'-phosphate
  modified_base 5: mod_base = OTHER; note = 2'-O-methyladenosine-3'-phosphate
  modified_base 6: mod_base = OTHER; note = 2'-deoxy-2'-fluorouridine-3'-phosphate
  modified_base 7: mod_base = OTHER; note = 2'-O-methyladenosine-3'-phosphate
  modified_base 8: mod_base = OTHER; note = 2'-deoxy-2'-fluoroguanosine-3'-phosphate
  modified_base 9: mod_base = OTHER; note = 2'-O-methylguanosine-3'-phosphate
  modified_base 10: mod_base = OTHER; note = 2'-deoxy-2'-fluorouridine-3'-phosphate
  modified_base 11: mod_base = OTHER; note = 2'-O-methyladenosine-3'-phosphate
  modified_base 12: mod_base = OTHER; note = 2'-O-methylguanosine-3'-phosphate
  modified_base 13: mod_base = OTHER; note = 2'-O-methyluridine-3'-phosphate
  modified_base 14: mod_base = OTHER; note = 2'-deoxy-2'-fluorouridine-3'-phosphate
  modified_base 15: mod_base = OTHER; note = 2'-O-methylguanosine-3'-phosphate
  modified_base 16: mod_base = OTHER; note = 2'-deoxy-2'-fluoroguanosine-3'-phosphate
  modified_base 17: mod_base = OTHER; note = 2'-O-methylcytidine-3'-phosphate
  modified_base 18: mod_base = OTHER; note = 2'-deoxy-2'-fluoroadenosine-3'-phosphate
  modified_base 19: mod_base = OTHER; note = 2'-O-methyladenosine-3'-phosphate
  modified_base 20: mod_base = OTHER; note = 2'-deoxy-2'-fluoroadenosine-3'-phosphate
  modified_base 21: mod_base = OTHER; note = 2'-O-methylguanosine-3'-phosphorothioate
  modified_base 22: mod_base = OTHER; note = 2'-O-methylcytidine-3'-phosphorothioate
  modified_base 23: mod_base = OTHER; note = 2'-O-methyluridine
tttcataggtagttggcaaagct

SEQ ID NO: 470 - RNA, 23 nt, synthetic construct
  source 1..23: mol_type = other RNA
  modified_base 1: mod_base = OTHER; note = 2'-O-methyladenosine-3'-phosphorothioate
  modified_base 2: mod_base = OTHER; note = 2'-deoxy-2'-fluoroguanosine-3'-phosphorothioate
  modified_base 3: mod_base = OTHER; note = 2'-O-methyladenosine-3'-phosphate
  modified_base 4: mod_base = OTHER; note = 2'-deoxy-2'-fluoroadenosine-3'-phosphate
  modified_base 5: mod_base = OTHER; note = 2'-O-methylcytidine-3'-phosphate
  modified_base 6: mod_base = OTHER; note = 2'-deoxy-2'-fluorouridine-3'-phosphate
  modified_base 7: mod_base = OTHER; note = 2'-O-methylcytidine-3'-phosphate
  modified_base 8: mod_base = OTHER; note = 2'-deoxy-2'-fluoroadenosine-3'-phosphate
  modified_base 9: mod_base = OTHER; note = 2'-O-methyluridine-3'-phosphate
  modified_base 10: mod_base = OTHER; note = 2'-deoxy-2'-fluorouridine-3'-phosphate
  modified_base 11: mod_base = OTHER; note = 2'-O-methylguanosine-3'-phosphate
  modified_base 12: mod_base = OTHER; note = 2'-O-methyluridine-3'-phosphate
  modified_base 13: mod_base = OTHER; note = 2'-O-methylcytidine-3'-phosphate
  modified_base 14: mod_base = OTHER; note = 2'-deoxy-2'-fluoroadenosine-3'-phosphate
  modified_base 15: mod_base = OTHER; note = 2'-O-methyladenosine-3'-phosphate
  modified_base 16: mod_base = OTHER; note = 2'-deoxy-2'-fluoroadenosine-3'-phosphate
  modified_base 17: mod_base = OTHER; note = 2'-O-methyladenosine-3'-phosphate
  modified_base 18: mod_base = OTHER; note = 2'-deoxy-2'-fluoroguanosine-3'-phosphate
  modified_base 19: mod_base = OTHER; note = 2'-O-methylguanosine-3'-phosphate
  modified_base 20: mod_base = OTHER; note = 2'-deoxy-2'-fluorouridine-3'-phosphate
  modified_base 21: mod_base = OTHER; note = 2'-O-methylguanosine-3'-phosphorothioate
  modified_base 22: mod_base = OTHER; note = 2'-O-methyluridine-3'-phosphorothioate
  modified_base 23: mod_base = OTHER; note = 2'-O-methylguanosine
agaactcattgtcaaaaggtgtg

SEQ ID NO: 471 - RNA, 23 nt, synthetic construct
  source 1..23: mol_type = other RNA
  modified_base 1: mod_base = OTHER; note = 2'-O-methyladenosine-3'-phosphorothioate
  modified_base 2: mod_base = OTHER; note = 2'-deoxy-2'-fluorouridine-3'-phosphorothioate
  modified_base 3: mod_base = OTHER; note = 2'-O-methyluridine-3'-phosphate
  modified_base 4: mod_base = OTHER; note = 2'-deoxy-2'-fluoroadenosine-3'-phosphate
  modified_base 5: mod_base = OTHER; note = 2'-O-methyladenosine-3'-phosphate
  modified_base 6: mod_base = OTHER; note = 2'-deoxy-2'-fluoroadenosine-3'-phosphate
  modified_base 7: mod_base = OTHER; note = 2'-O-methyladenosine-3'-phosphate
  modified_base 8: mod_base = OTHER; note = 2'-deoxy-2'-fluorouridine-3'-phosphate
  modified_base 9: mod_base = OTHER; note = 2'-O-methyluridine-3'-phosphate
  modified_base 10: mod_base = OTHER; note = 2'-deoxy-2'-fluorouridine-3'-phosphate
  modified_base 11: mod_base = OTHER; note = 2'-O-methylguanosine-3'-phosphate
  modified_base 12: mod_base = OTHER; note = 2'-O-methyladenosine-3'-phosphate
  modified_base 13: mod_base = OTHER; note = 2'-O-methyluridine-3'-phosphate
  modified_base 14: mod_base = OTHER; note = 2'-deoxy-2'-fluoroguanosine-3'-phosphate
  modified_base 15: mod_base = OTHER; note = 2'-O-methyluridine-3'-phosphate
  modified_base 16: mod_base = OTHER; note = 2'-deoxy-2'-fluorocytidine-3'-phosphate
  modified_base 17: mod_base = OTHER; note = 2'-O-methyluridine-3'-phosphate
  modified_base 18: mod_base = OTHER; note = 2'-deoxy-2'-fluorouridine-3'-phosphate
  modified_base 19: mod_base = OTHER; note = 2'-O-methylcytidine-3'-phosphate
  modified_base 20: mod_base = OTHER; note = 2'-deoxy-2'-fluorouridine-3'-phosphate
  modified_base 21: mod_base = OTHER; note = 2'-O-methylcytidine-3'-phosphorothioate
  modified_base 22: mod_base = OTHER; note = 2'-O-methyluridine-3'-phosphorothioate
  modified_base 23: mod_base = OTHER; note = 2'-O-methyluridine
attaaaatttgatgtcttctctt

SEQ ID NO: 472 - RNA, 23 nt, synthetic construct
  source 1..23: mol_type = other RNA
  modified_base 1: mod_base = OTHER; note = 2'-O-methyluridine-3'-phosphorothioate
  modified_base 2: mod_base = OTHER; note = 2'-deoxy-2'-fluorocytidine-3'-phosphorothioate
  modified_base 3: mod_base = OTHER; note = 2'-O-methylcytidine-3'-phosphate
  modified_base 4: mod_base = OTHER; note = 2'-deoxy-2'-fluoroadenosine-3'-phosphate
  modified_base 5: mod_base = OTHER; note = 2'-O-methyluridine-3'-phosphate
  modified_base 6: mod_base = OTHER; note = 2'-deoxy-2'-fluorouridine-3'-phosphate
  modified_base 7: mod_base = OTHER; note = 2'-O-methylguanosine-3'-phosphate
  modified_base 8: mod_base = OTHER; note = 2'-deoxy-2'-fluorouridine-3'-phosphate
  modified_base 9: mod_base = OTHER; note = 2'-O-methyladenosine-3'-phosphate
  modified_base 10: mod_base = OTHER; note = 2'-deoxy-2'-fluoroguanosine-3'-phosphate
  modified_base 11: mod_base = OTHER; note = 2'-O-methyladenosine-3'-phosphate
  modified_base 12: mod_base = OTHER; note = 2'-O-methyladenosine-3'-phosphate
  modified_base 13: mod_base = OTHER; note = 2'-O-methylcytidine-3'-phosphate
  modified_base 14: mod_base = OTHER; note = 2'-deoxy-2'-fluorouridine-3'-phosphate
  modified_base 15: mod_base = OTHER; note = 2'-O-methylcytidine-3'-phosphate
  modified_base 16: mod_base = OTHER; note = 2'-deoxy-2'-fluoroadenosine-3'-phosphate
  modified_base 17: mod_base = OTHER; note = 2'-O-methyluridine-3'-phosphate
  modified_base 18: mod_base = OTHER; note = 2'-deoxy-2'-fluorouridine-3'-phosphate
  modified_base 19: mod_base = OTHER; note = 2'-O-methylguanosine-3'-phosphate
  modified_base 20: mod_base = OTHER; note = 2'-deoxy-2'-fluorouridine-3'-phosphate
  modified_base 21: mod_base = OTHER; note = 2'-O-methylcytidine-3'-phosphorothioate
  modified_base 22: mod_base = OTHER; note = 2'-O-methyladenosine-3'-phosphorothioate
  modified_base 23: mod_base = OTHER; note = 2'-O-methyladenosine
tccattgtagaactcattgtcaa

SEQ ID NO: 473 - RNA, 23 nt, synthetic construct
  source 1..23: mol_type = other RNA
  modified_base 1: mod_base = OTHER; note = 2'-O-methyluridine-3'-phosphorothioate
  modified_base 2: mod_base = OTHER; note = 2'-deoxy-2'-fluorouridine-3'-phosphorothioate
  modified_base 3: mod_base = OTHER; note = 2'-O-methylcytidine-3'-phosphate
  modified_base 4: mod_base = OTHER; note = 2'-deoxy-2'-fluoroadenosine-3'-phosphate
  modified_base 5: mod_base = OTHER; note = 2'-O-methyluridine-3'-phosphate
  modified_base 6: mod_base = OTHER; note = 2'-deoxy-2'-fluoroguanosine-3'-phosphate
  modified_base 7: mod_base = OTHER; note = 2'-O-methylguanosine-3'-phosphate
  modified_base 8: mod_base = OTHER; note = 2'-deoxy-2'-fluoroadenosine-3'-phosphate
  modified_base 9: mod_base = OTHER; note = 2'-O-methyladenosine-3'-phosphate
  modified_base 10: mod_base = OTHER; note = 2'-deoxy-2'-fluoroguanosine-3'-phosphate
  modified_base 11: mod_base = OTHER; note = 2'-O-methylcytidine-3'-phosphate
  modified_base 12: mod_base = OTHER; note = 2'-O-methyluridine-3'-phosphate
  modified_base 13: mod_base = OTHER; note = 2'-O-methyluridine-3'-phosphate
  modified_base 14: mod_base = OTHER; note = 2'-deoxy-2'-fluorouridine-3'-phosphate
  modified_base 15: mod_base = OTHER; note = 2'-O-methyladenosine-3'-phosphate
  modified_base 16: mod_base = OTHER; note = 2'-deoxy-2'-fluorouridine-3'-phosphate
  modified_base 17: mod_base = OTHER; note = 2'-O-methylcytidine-3'-phosphate
  modified_base 18: mod_base = OTHER; note = 2'-deoxy-2'-fluorocytidine-3'-phosphate
  modified_base 19: mod_base = OTHER; note = 2'-O-methyladenosine-3'-phosphate
  modified_base 20: mod_base = OTHER; note = 2'-deoxy-2'-fluoroadenosine-3'-phosphate
  modified_base 21: mod_base = OTHER; note = 2'-O-methyladenosine-3'-phosphorothioate
  modified_base 22: mod_base = OTHER; note = 2'-O-methyladenosine-3'-phosphorothioate
  modified_base 23: mod_base = OTHER; note = 2'-O-methylcytidine
ttcatggaagctttatccaaaac

SEQ ID NO: 474 - RNA, 23 nt, synthetic construct
  source 1..23: mol_type = other RNA
  modified_base 1: mod_base = OTHER; note = 2'-O-methylcytidine-3'-phosphorothioate
  modified_base 2: mod_base = OTHER; note = 2'-deoxy-2'-fluorouridine-3'-phosphorothioate
  modified_base 3: mod_base = OTHER; note = 2'-O-methylcytidine-3'-phosphate
  modified_base 4: mod_base = OTHER; note = 2'-deoxy-2'-fluoroguanosine-3'-phosphate
  modified_base 5: mod_base = OTHER; note = 2'-O-methylcytidine-3'-phosphate
  modified_base 6: mod_base = OTHER; note = 2'-deoxy-2'-fluorocytidine-3'-phosphate
  modified_base 7: mod_base = OTHER; note = 2'-O-methyluridine-3'-phosphate
  modified_base 8: mod_base = OTHER; note = 2'-deoxy-2'-fluorouridine-3'-phosphate
  modified_base 9: mod_base = OTHER; note = 2'-O-methyluridine-3'-phosphate
  modified_base 10: mod_base = OTHER; note = 2'-deoxy-2'-fluoroguanosine-3'-phosphate
  modified_base 11: mod_base = OTHER; note = 2'-O-methylguanosine-3'-phosphate
  modified_base 12: mod_base = OTHER; note = 2'-O-methyluridine-3'-phosphate
  modified_base 13: mod_base = OTHER; note = 2'-O-methyluridine-3'-phosphate
  modified_base 14: mod_base = OTHER; note = 2'-deoxy-2'-fluorouridine-3'-phosphate
  modified_base 15: mod_base = OTHER; note = 2'-O-methylcytidine-3'-phosphate
  modified_base 16: mod_base = OTHER; note = 2'-deoxy-2'-fluoroadenosine-3'-phosphate
  modified_base 17: mod_base = OTHER; note = 2'-O-methyluridine-3'-phosphate
  modified_base 18: mod_base = OTHER; note = 2'-deoxy-2'-fluoroadenosine-3'-phosphate
  modified_base 19: mod_base = OTHER; note = 2'-O-methylguanosine-3'-phosphate
  modified_base 20: mod_base = OTHER; note = 2'-deoxy-2'-fluoroadenosine-3'-phosphate
  modified_base 21: mod_base = OTHER; note = 2'-O-methyluridine-3'-phosphorothioate
  modified_base 22: mod_base = OTHER; note = 2'-O-methylcytidine-3'-phosphorothioate
  modified_base 23: mod_base = OTHER; note = 2'-O-methyladenosine
ctcgcctttggtttcatagatca

SEQ ID NO: 475 - RNA, 23 nt, synthetic construct
  source 1..23: mol_type = other RNA
  modified_base 1: mod_base = OTHER; note = 2'-O-methyluridine-3'-phosphorothioate
  modified_base 2: mod_base = OTHER; note = 2'-deoxy-2'-fluorouridine-3'-phosphorothioate
  modified_base 3: mod_base = OTHER; note = 2'-O-methyladenosine-3'-phosphate
  modified_base 4: mod_base = OTHER; note = 2'-deoxy-2'-fluorocytidine-3'-phosphate
  modified_base 5: mod_base = OTHER; note = 2'-O-methyladenosine-3'-phosphate
  modified_base 6: mod_base = OTHER; note = 2'-deoxy-2'-fluorocytidine-3'-phosphate
  modified_base 7: mod_base = OTHER; note = 2'-O-methyluridine-3'-phosphate
  modified_base 8: mod_base = OTHER; note = 2'-deoxy-2'-fluoroadenosine-3'-phosphate
  modified_base 9: mod_base = OTHER; note = 2'-O-methyladenosine-3'-phosphate
  modified_base 10: mod_base = OTHER; note = 2'-deoxy-2'-fluoroadenosine-3'-phosphate
  modified_base 11: mod_base = OTHER; note = 2'-O-methyluridine-3'-phosphate
  modified_base 12: mod_base = OTHER; note = 2'-O-methyluridine-3'-phosphate
  modified_base 13: mod_base = OTHER; note = 2'-O-methylcytidine-3'-phosphate
  modified_base 14: mod_base = OTHER; note = 2'-deoxy-2'-fluoroadenosine-3'-phosphate
  modified_base 15: mod_base = OTHER; note = 2'-O-methyluridine-3'-phosphate
  modified_base 16: mod_base = OTHER; note = 2'-deoxy-2'-fluorouridine-3'-phosphate
  modified_base 17: mod_base = OTHER; note = 2'-O-methylguanosine-3'-phosphate
  modified_base 18: mod_base = OTHER; note = 2'-deoxy-2'-fluoroadenosine-3'-phosphate
  modified_base 19: mod_base = OTHER; note = 2'-O-methyluridine-3'-phosphate
  modified_base 20: mod_base = OTHER; note = 2'-deoxy-2'-fluoroadenosine-3'-phosphate
  modified_base 21: mod_base = OTHER; note = 2'-O-methyluridine-3'-phosphorothioate
  modified_base 22: mod_base = OTHER; note = 2'-O-methyladenosine-3'-phosphorothioate
  modified_base 23: mod_base = OTHER; note = 2'-O-methylguanosine
ttacactaaattcattgatatag

SEQ ID NO: 476 - RNA, 23 nt, synthetic construct
  source 1..23: mol_type = other RNA
  modified_base 1: mod_base = OTHER; note = 2'-O-methyladenosine-3'-phosphorothioate
  modified_base 2: mod_base = OTHER; note = 2'-deoxy-2'-fluoroadenosine-3'-phosphorothioate
  modified_base 3: mod_base = OTHER; note = 2'-O-methylcytidine-3'-phosphate
  modified_base 4: mod_base = OTHER; note = 2'-deoxy-2'-fluorouridine-3'-phosphate
  modified_base 5: mod_base = OTHER; note = 2'-O-methylcytidine-3'-phosphate
  modified_base 6: mod_base = OTHER; note = 2'-deoxy-2'-fluoroadenosine-3'-phosphate
  modified_base 7: mod_base = OTHER; note = 2'-O-methyluridine-3'-phosphate
  modified_base 8: mod_base = OTHER; note = 2'-deoxy-2'-fluorouridine-3'-phosphate
  modified_base 9: mod_base = OTHER; note = 2'-O-methylguanosine-3'-phosphate
  modified_base 10: mod_base = OTHER; note = 2'-deoxy-2'-fluorouridine-3'-phosphate
  modified_base 11: mod_base = OTHER; note = 2'-O-methylcytidine-3'-phosphate
  modified_base 12: mod_base = OTHER; note = 2'-O-methyladenosine-3'-phosphate
  modified_base 13: mod_base = OTHER; note = 2'-O-methyladenosine-3'-phosphate
  modified_base 14: mod_base = OTHER; note = 2'-deoxy-2'-fluoroadenosine-3'-phosphate
  modified_base 15: mod_base = OTHER; note = 2'-O-methyladenosine-3'-phosphate
  modified_base 16: mod_base = OTHER; note = 2'-deoxy-2'-fluoroguanosine-3'-phosphate
  modified_base 17: mod_base = OTHER; note = 2'-O-methylguanosine-3'-phosphate
  modified_base 18: mod_base = OTHER; note = 2'-deoxy-2'-fluorouridine-3'-phosphate
  modified_base 19: mod_base = OTHER; note = 2'-O-methylguanosine-3'-phosphate
  modified_base 20: mod_base = OTHER; note = 2'-deoxy-2'-fluorouridine-3'-phosphate
  modified_base 21: mod_base = OTHER; note = 2'-O-methylguanosine-3'-phosphorothioate
  modified_base 22: mod_base = OTHER; note = 2'-O-methylcytidine-3'-phosphorothioate
  modified_base 23: mod_base = OTHER; note = 2'-O-methyluridine
aactcattgtcaaaaggtgtgct

SEQ ID NO: 477 - RNA, 23 nt, synthetic construct
  source 1..23: mol_type = other RNA
  modified_base 1: mod_base = OTHER; note = 2'-O-methyluridine-3'-phosphorothioate
  modified_base 2: mod_base = OTHER; note = 2'-deoxy-2'-fluorouridine-3'-phosphorothioate
  modified_base 3: mod_base = OTHER; note = 2'-O-methylcytidine-3'-phosphate
  modified_base 4: mod_base = OTHER; note = 2'-deoxy-2'-fluoroadenosine-3'-phosphate
  modified_base 5: mod_base = OTHER; note = 2'-O-methyladenosine-3'-phosphate
  modified_base 6: mod_base = OTHER; note = 2'-deoxy-2'-fluoroadenosine-3'-phosphate
  modified_base 7: mod_base = OTHER; note = 2'-O-methyladenosine-3'-phosphate
  modified_base 8: mod_base = OTHER; note = 2'-deoxy-2'-fluoroguanosine-3'-phosphate
  modified_base 9: mod_base = OTHER; note = 2'-O-methylguanosine-3'-phosphate
  modified_base 10: mod_base = OTHER; note = 2'-deoxy-2'-fluorouridine-3'-phosphate
  modified_base 11: mod_base = OTHER; note = 2'-O-methylcytidine-3'-phosphate
  modified_base 12: mod_base = OTHER; note = 2'-O-methyluridine-3'-phosphate
  modified_base 13: mod_base = OTHER; note = 2'-O-methylcytidine-3'-phosphate
  modified_base 14: mod_base = OTHER; note = 2'-deoxy-2'-fluoroadenosine-3'-phosphate
  modified_base 15: mod_base = OTHER; note = 2'-O-methylguanosine-3'-phosphate
  modified_base 16: mod_base = OTHER; note = 2'-deoxy-2'-fluoroadenosine-3'-phosphate
  modified_base 17: mod_base = OTHER; note = 2'-O-methylcytidine-3'-phosphate
  modified_base 18: mod_base = OTHER; note = 2'-deoxy-2'-fluorocytidine-3'-phosphate
  modified_base 19: mod_base = OTHER; note = 2'-O-methylcytidine-3'-phosphate
  modified_base 20: mod_base = OTHER; note = 2'-deoxy-2'-fluorouridine-3'-phosphate
  modified_base 21: mod_base = OTHER; note = 2'-O-methyladenosine-3'-phosphorothioate
  modified_base 22: mod_base = OTHER; note = 2'-O-methyladenosine-3'-phosphorothioate
  modified_base 23: mod_base = OTHER; note = 2'-O-methylguanosine
ttcaaaaggtctcagaccctaag

SEQ ID NO: 478 - RNA, 23 nt, synthetic construct
  source 1..23: mol_type = other RNA
  modified_base 1: mod_base = OTHER; note = 2'-O-methyladenosine-3'-phosphorothioate
  modified_base 2: mod_base = OTHER; note = 2'-deoxy-2'-fluoroadenosine-3'-phosphorothioate
  modified_base 3: mod_base = OTHER; note = 2'-O-methyluridine-3'-phosphate
  modified_base 4: mod_base = OTHER; note = 2'-deoxy-2'-fluoroguanosine-3'-phosphate
  modified_base 5: mod_base = OTHER; note = 2'-O-methylguanosine-3'-phosphate
  modified_base 6: mod_base = OTHER; note = 2'-deoxy-2'-fluorocytidine-3'-phosphate
  modified_base 7: mod_base = OTHER; note = 2'-O-methyluridine-3'-phosphate
  modified_base 8: mod_base = OTHER; note = 2'-deoxy-2'-fluorocytidine-3'-phosphate
  modified_base 9: mod_base = OTHER; note = 2'-O-methyluridine-3'-phosphate
  modified_base 10: mod_base = OTHER; note = 2'-deoxy-2'-fluorouridine-3'-phosphate
  modified_base 11: mod_base = OTHER; note = 2'-O-methyluridine-3'-phosphate
  modified_base 12: mod_base = OTHER; note = 2'-O-methylcytidine-3'-phosphate
  modified_base 13: mod_base = OTHER; note = 2'-O-methylcytidine-3'-phosphate
  modified_base 14: mod_base = OTHER; note = 2'-deoxy-2'-fluoroadenosine-3'-phosphate
  modified_base 15: mod_base = OTHER; note = 2'-O-methyladenosine-3'-phosphate
  modified_base 16: mod_base = OTHER; note = 2'-deoxy-2'-fluoroguanosine-3'-phosphate
  modified_base 17: mod_base = OTHER; note = 2'-O-methyluridine-3'-phosphate
  modified_base 18: mod_base = OTHER; note = 2'-deoxy-2'-fluorouridine-3'-phosphate
  modified_base 19: mod_base = OTHER; note = 2'-O-methyluridine-3'-phosphate
  modified_base 20: mod_base = OTHER; note = 2'-deoxy-2'-fluorouridine-3'-phosphate
  modified_base 21: mod_base = OTHER; note = 2'-O-methylguanosine-3'-phosphorothioate
  modified_base 22: mod_base = OTHER; note = 2'-O-methyluridine-3'-phosphorothioate
  modified_base 23: mod_base = OTHER; note = 2'-O-methyluridine
aatggctctttccaagttttgtt

SEQ ID NO: 479 - RNA, 23 nt, synthetic construct
  source 1..23: mol_type = other RNA
  modified_base 1: mod_base = OTHER; note = 2'-O-methyladenosine-3'-phosphorothioate
  modified_base 2: mod_base = OTHER; note = 2'-deoxy-2'-fluorocytidine-3'-phosphorothioate
  modified_base 3: mod_base = OTHER; note = 2'-O-methyluridine-3'-phosphate
  modified_base 4: mod_base = OTHER; note = 2'-deoxy-2'-fluorocytidine-3'-phosphate
  modified_base 5: mod_base = OTHER; note = 2'-O-methyladenosine-3'-phosphate
  modified_base 6: mod_base = OTHER; note = 2'-deoxy-2'-fluorouridine-3'-phosphate
  modified_base 7: mod_base = OTHER; note = 2'-O-methyluridine-3'-phosphate
  modified_base 8: mod_base = OTHER; note = 2'-deoxy-2'-fluoroguanosine-3'-phosphate
  modified_base 9: mod_base = OTHER; note = 2'-O-methyluridine-3'-phosphate
  modified_base 10: mod_base = OTHER; note = 2'-deoxy-2'-fluorocytidine-3'-phosphate
  modified_base 11: mod_base = OTHER; note = 2'-O-methyladenosine-3'-phosphate
  modified_base 12: mod_base = OTHER; note = 2'-O-methyladenosine-3'-phosphate
  modified_base 13: mod_base = OTHER; note = 2'-O-methyladenosine-3'-phosphate
  modified_base 14: mod_base = OTHER; note = 2'-deoxy-2'-fluoroadenosine-3'-phosphate
  modified_base 15: mod_base = OTHER; note = 2'-O-methylguanosine-3'-phosphate
  modified_base 16: mod_base = OTHER; note = 2'-deoxy-2'-fluoroguanosine-3'-phosphate
  modified_base 17: mod_base = OTHER; note = 2'-O-methyluridine-3'-phosphate
  modified_base 18: mod_base = OTHER; note = 2'-deoxy-2'-fluoroguanosine-3'-phosphate
  modified_base 19: mod_base = OTHER; note = 2'-O-methyluridine-3'-phosphate
  modified_base 20: mod_base = OTHER; note = 2'-deoxy-2'-fluoroguanosine-3'-phosphate
  modified_base 21: mod_base = OTHER; note = 2'-O-methylcytidine-3'-phosphorothioate
  modified_base 22: mod_base = OTHER; note = 2'-O-methyluridine-3'-phosphorothioate
  modified_base 23: mod_base = OTHER; note = 2'-O-methyluridine
actcattgtcaaaaggtgtgctt

SEQ ID NO: 480 - RNA, 23 nt, synthetic construct
  source 1..23: mol_type = other RNA
  modified_base 1: mod_base = OTHER; note = 2'-O-methyluridine-3'-phosphorothioate
  modified_base 2: mod_base = OTHER; note = 2'-deoxy-2'-fluorouridine-3'-phosphorothioate
  modified_base 3: mod_base = OTHER; note = 2'-O-methyluridine-3'-phosphate
  modified_base 4: mod_base = OTHER; note = 2'-deoxy-2'-fluorouridine-3'-phosphate
  modified_base 5: mod_base = OTHER; note = 2'-O-methyluridine-3'-phosphate
  modified_base 6: mod_base = OTHER; note = 2'-deoxy-2'-fluorocytidine-3'-phosphate
  modified_base 7: mod_base = OTHER; note = 2'-O-methyluridine-3'-phosphate
  modified_base 8: mod_base = OTHER; note = 2'-deoxy-2'-fluorocytidine-3'-phosphate
  modified_base 9: mod_base = OTHER; note = 2'-O-methylguanosine-3'-phosphate
  modified_base 10: mod_base = OTHER; note = 2'-deoxy-2'-fluorocytidine-3'-phosphate
  modified_base 11: mod_base = OTHER; note = 2'-O-methylcytidine-3'-phosphate
  modified_base 12: mod_base = OTHER; note = 2'-O-methyluridine-3'-phosphate
  modified_base 13: mod_base = OTHER; note = 2'-O-methyluridine-3'-phosphate
  modified_base 14: mod_base = OTHER; note = 2'-deoxy-2'-fluorouridine-3'-phosphate
  modified_base 15: mod_base = OTHER; note = 2'-O-methylguanosine-3'-phosphate
  modified_base 16: mod_base = OTHER; note = 2'-deoxy-2'-fluoroguanosine-3'-phosphate
  modified_base 17: mod_base = OTHER; note = 2'-O-methyluridine-3'-phosphate
  modified_base 18: mod_base = OTHER; note = 2'-deoxy-2'-fluorouridine-3'-phosphate
  modified_base 19: mod_base = OTHER; note = 2'-O-methyluridine-3'-phosphate
  modified_base 20: mod_base = OTHER; note = 2'-deoxy-2'-fluorocytidine-3'-phosphate
  modified_base 21: mod_base = OTHER; note = 2'-O-methyladenosine-3'-phosphorothioate
  modified_base 22: mod_base = OTHER; note = 2'-O-methyluridine-3'-phosphorothioate
  modified_base 23: mod_base = OTHER; note = 2'-O-methyladenosine
tttttctcgcctttggtttcata

SEQ ID NO: 481 - RNA, 21 nt, synthetic construct
  source 1..21: mol_type = other RNA
  modified_base 1: mod_base = OTHER; note = 2'-deoxy-2'-fluoroguanosine-3'-phosphorothioate
  modified_base 2: mod_base = OTHER; note = 2'-O-methyladenosine-3'-phosphorothioate
  modified_base 3: mod_base = OTHER; note = 2'-deoxy-2'-fluorouridine-3'-phosphate
  modified_base 4: mod_base = OTHER; note = 2'-O-methyluridine-3'-phosphate
  modified_base 5: mod_base = OTHER; note = 2'-deoxy-2'-fluoroguanosine-3'-phosphate
  modified_base 6: mod_base = OTHER; note = 2'-O-methyladenosine-3'-phosphate
  modified_base 7: mod_base = OTHER; note = 2'-deoxy-2'-fluoroguanosine-3'-phosphate
  modified_base 8: mod_base = OTHER; note = 2'-O-methyladenosine-3'-phosphate
  modified_base 9: mod_base = OTHER; note = 2'-deoxy-2'-fluoroadenosine-3'-phosphate
  modified_base 10: mod_base = OTHER; note = 2'-deoxy-2'-fluoroguanosine-3'-phosphate
  modified_base 11: mod_base = OTHER; note = 2'-deoxy-2'-fluoroguanosine-3'-phosphate
  modified_base 12: mod_base = OTHER; note = 2'-O-methyluridine-3'-phosphate
  modified_base 13: mod_base = OTHER; note = 2'-deoxy-2'-fluoroguanosine-3'-phosphate
  modified_base 14: mod_base = OTHER; note = 2'-O-methylguanosine-3'-phosphate
  modified_base 15: mod_base = OTHER; note = 2'-deoxy-2'-fluorocytidine-3'-phosphate
  modified_base 16: mod_base = OTHER; note = 2'-O-methylguanosine-3'-phosphate
  modified_base 17: mod_base = OTHER; note = 2'-deoxy-2'-fluoroadenosine-3'-phosphate
  modified_base 18: mod_base = OTHER; note = 2'-O-methylguanosine-3'-phosphate
  modified_base 19: mod_base = OTHER; note = 2'-deoxy-2'-fluorouridine-3'-phosphate
  modified_base 20: mod_base = OTHER; note = 2'-O-methyluridine-3'-phosphate
  modified_base 21: mod_base = OTHER; note = 2'-deoxy-2'-fluoroadenosine-3'-phosphate ((2S,4R)-1-[29-[[2-(acetylamino)-2-deoxy-beta-D-galactopyra nosyl]oxy]-14,14-bis[[3-[[3-[[5-[[2-(acetylamino)-2-deoxy-b eta-D-galactopyranosyl]oxy]-1-oxopentyl]amino]propyl]amino] -3-oxopropoxy]methyl]-1,12,19,25-tetraoxo-16-oxa-13,20,24-t riazanonacos-1-yl]-4-hydroxy-2-pyrrolidinyl)methyl ester
gattgagaaggtggcgagtta

SEQ ID NO: 482 - RNA, 21 nt, synthetic construct
  source 1..21: mol_type = other RNA
  modified_base 1: mod_base = OTHER; note = 2'-deoxy-2'-fluoroadenosine-3'-phosphorothioate
  modified_base 2: mod_base = OTHER; note = 2'-O-methylguanosine-3'-phosphorothioate
  modified_base 3: mod_base = OTHER; note = 2'-deoxy-2'-fluorocytidine-3'-phosphate
  modified_base 4: mod_base = OTHER; note = 2'-O-methyladenosine-3'-phosphate
  modified_base 5: mod_base = OTHER; note = 2'-deoxy-2'-fluoroadenosine-3'-phosphate
  modified_base 6: mod_base = OTHER; note = 2'-O-methylcytidine-3'-phosphate
  modified_base 7: mod_base = OTHER; note = 2'-deoxy-2'-fluoroadenosine-3'-phosphate
  modified_base 8: mod_base = OTHER; note = 2'-O-methyluridine-3'-phosphate
  modified_base 9: mod_base = OTHER; note = 2'-deoxy-2'-fluoroguanosine-3'-phosphate
  modified_base 10: mod_base = OTHER; note = 2'-deoxy-2'-fluorouridine-3'-phosphate
  modified_base 11: mod_base = OTHER; note = 2'-deoxy-2'-fluoroguanosine-3'-phosphate
  modified_base 12: mod_base = OTHER; note = 2'-O-methyluridine-3'-phosphate
  modified_base 13: mod_base = OTHER; note = 2'-deoxy-2'-fluorouridine-3'-phosphate
  modified_base 14: mod_base = OTHER; note = 2'-O-methylcytidine-3'-phosphate
  modified_base 15: mod_base = OTHER; note = 2'-deoxy-2'-fluoroadenosine-3'-phosphate
  modified_base 16: mod_base = OTHER; note = 2'-O-methyladenosine-3'-phosphate
  modified_base 17: mod_base = OTHER; note = 2'-deoxy-2'-fluoroadenosine-3'-phosphate
  modified_base 18: mod_base = OTHER; note = 2'-O-methylguanosine-3'-phosphate
  modified_base 19: mod_base = OTHER; note = 2'-deoxy-2'-fluorouridine-3'-phosphate
  modified_base 20: mod_base = OTHER; note = 2'-O-methylcytidine-3'-phosphate
  modified_base 21: mod_base = OTHER; note = 2'-deoxy-2'-fluoroadenosine-3'-phosphate ((2S,4R)-1-[29-[[2-(acetylamino)-2-deoxy-beta-D-galactopyra nosyl]oxy]-14,14-bis[[3-[[3-[[5-[[2-(acetylamino)-2-deoxy-b eta-D-galactopyranosyl]oxy]-1-oxopentyl]amino]propyl]amino] -3-oxopropoxy]methyl]-1,12,19,25-tetraoxo-16-oxa-13,20,24-t riazanonacos-1-yl]-4-hydroxy-2-pyrrolidinyl)methyl ester
agcaacatgtgttcaaagtca

SEQ ID NO: 483 - RNA, 21 nt, synthetic construct
  source 1..21: mol_type = other RNA
  modified_base 1: mod_base = OTHER; note = 2'-deoxy-2'-fluoroguanosine-3'-phosphorothioate
  modified_base 2: mod_base = OTHER; note = 2'-O-methylcytidine-3'-phosphorothioate
  modified_base 3: mod_base = OTHER; note = 2'-deoxy-2'-fluorouridine-3'-phosphate
  modified_base 4: mod_base = OTHER; note = 2'-O-methylguanosine-3'-phosphate
  modified_base 5: mod_base = OTHER; note = 2'-deoxy-2'-fluorouridine-3'-phosphate
  modified_base 6: mod_base = OTHER; note = 2'-O-methylguanosine-3'-phosphate
  modified_base 7: mod_base = OTHER; note = 2'-deoxy-2'-fluoroguanosine-3'-phosphate
  modified_base 8: mod_base = OTHER; note = 2'-O-methyluridine-3'-phosphate
  modified_base 9: mod_base = OTHER; note = 2'-deoxy-2'-fluoroguanosine-3'-phosphate
  modified_base 10: mod_base = OTHER; note = 2'-deoxy-2'-fluorouridine-3'-phosphate
  modified_base 11: mod_base = OTHER; note = 2'-deoxy-2'-fluorocytidine-3'-phosphate
  modified_base 12: mod_base = OTHER; note = 2'-O-methyluridine-3'-phosphate
  modified_base 13: mod_base = OTHER; note = 2'-deoxy-2'-fluoroguanosine-3'-phosphate
  modified_base 14: mod_base = OTHER; note = 2'-O-methyladenosine-3'-phosphate
  modified_base 15: mod_base = OTHER; note = 2'-deoxy-2'-fluoroguanosine-3'-phosphate
  modified_base 16: mod_base = OTHER; note = 2'-O-methyluridine-3'-phosphate
  modified_base 17: mod_base = OTHER; note = 2'-deoxy-2'-fluoroadenosine-3'-phosphate
  modified_base 18: mod_base = OTHER; note = 2'-O-methylcytidine-3'-phosphate
  modified_base 19: mod_base = OTHER; note = 2'-deoxy-2'-fluorouridine-3'-phosphate
  modified_base 20: mod_base = OTHER; note = 2'-O-methyluridine-3'-phosphate
  modified_base 21: mod_base = OTHER; note = 2'-deoxy-2'-fluorouridine-3'-phosphate ((2S,4R)-1-[29-[[2-(acetylamino)-2-deoxy-beta-D-galactopyra nosyl]oxy]-14,14-bis[[3-[[3-[[5-[[2-(acetylamino)-2-deoxy-b eta-D-galactopyranosyl]oxy]-1-oxopentyl]amino]propyl]amino] -3-oxopropoxy]methyl]-1,12,19,25-tetraoxo-16-oxa-13,20,24-t riazanonacos-1-yl]-4-hydroxy-2-pyrrolidinyl)methyl ester
gctgtggtgtctgagtacttt

SEQ ID NO: 484 - RNA, 23 nt, synthetic construct
  source 1..23: mol_type = other RNA
  modified_base 1: mod_base = OTHER; note = 2'-O-methyluridine-3'-phosphorothioate
  modified_base 2: mod_base = OTHER; note = 2'-deoxy-2'-fluoroadenosine-3'-phosphorothioate
  modified_base 3: mod_base = OTHER; note = 2'-O-methyladenosine-3'-phosphate
  modified_base 4: mod_base = OTHER; note = 2'-deoxy-2'-fluorocytidine-3'-phosphate
  modified_base 5: mod_base = OTHER; note = 2'-O-methyluridine-3'-phosphate
  modified_base 6: mod_base = OTHER; note = 2'-deoxy-2'-fluorocytidine-3'-phosphate
  modified_base 7: mod_base = OTHER; note = 2'-O-methylguanosine-3'-phosphate
  modified_base 8: mod_base = OTHER; note = 2'-deoxy-2'-fluorocytidine-3'-phosphate
  modified_base 9: mod_base = OTHER; note = 2'-O-methylcytidine-3'-phosphate
  modified_base 10: mod_base = OTHER; note = 2'-deoxy-2'-fluoroadenosine-3'-phosphate
  modified_base 11: mod_base = OTHER; note = 2'-O-methylcytidine-3'-phosphate
  modified_base 12: mod_base = OTHER; note = 2'-O-methylcytidine-3'-phosphate
  modified_base 13: mod_base = OTHER; note = 2'-O-methyluridine-3'-phosphate
  modified_base 14: mod_base = OTHER; note = 2'-deoxy-2'-fluorouridine-3'-phosphate
  modified_base 15: mod_base = OTHER; note = 2'-O-methylcytidine-3'-phosphate
  modified_base 16: mod_base = OTHER; note = 2'-deoxy-2'-fluorouridine-3'-phosphate
  modified_base 17: mod_base = OTHER; note = 2'-O-methylcytidine-3'-phosphate
  modified_base 18: mod_base = OTHER; note = 2'-deoxy-2'-fluoroadenosine-3'-phosphate
  modified_base 19: mod_base = OTHER; note = 2'-O-methyladenosine-3'-phosphate
  modified_base 20: mod_base = OTHER; note = 2'-deoxy-2'-fluorouridine-3'-phosphate
  modified_base 21: mod_base = OTHER; note = 2'-O-methylcytidine-3'-phosphorothioate
  modified_base 22: mod_base = OTHER; note = 2'-O-methyladenosine-3'-phosphorothioate
  modified_base 23: mod_base = OTHER; note = 2'-O-methyladenosine
taactcgccaccttctcaatcaa

SEQ ID NO: 485 - RNA, 23 nt, synthetic construct
  source 1..23: mol_type = other RNA
  modified_base 1: mod_base = OTHER; note = 2'-O-methyluridine-3'-phosphorothioate
  modified_base 2: mod_base = OTHER; note = 2'-deoxy-2'-fluoroguanosine-3'-phosphorothioate
  modified_base 3: mod_base = OTHER; note = 2'-O-methyladenosine-3'-phosphate
  modified_base 4: mod_base = OTHER; note = 2'-deoxy-2'-fluorocytidine-3'-phosphate
  modified_base 5: mod_base = OTHER; note = 2'-O-methyluridine-3'-phosphate
  modified_base 6: mod_base = OTHER; note = 2'-deoxy-2'-fluorouridine-3'-phosphate
  modified_base 7: mod_base = OTHER; note = 2'-O-methyluridine-3'-phosphate
  modified_base 8: mod_base = OTHER; note = 2'-deoxy-2'-fluoroguanosine-3'-phosphate
  modified_base 9: mod_base = OTHER; note = 2'-O-methyladenosine-3'-phosphate
  modified_base 10: mod_base = OTHER; note = 2'-deoxy-2'-fluoroadenosine-3'-phosphate
  modified_base 11: mod_base = OTHER; note = 2'-O-methylcytidine-3'-phosphate
  modified_base 12: mod_base = OTHER; note = 2'-O-methyladenosine-3'-phosphate
  modified_base 13: mod_base = OTHER; note = 2'-O-methylcytidine-3'-phosphate
  modified_base 14: mod_base = OTHER; note = 2'-deoxy-2'-fluoroadenosine-3'-phosphate
  modified_base 15: mod_base = OTHER; note = 2'-O-methyluridine-3'-phosphate
  modified_base 16: mod_base = OTHER; note = 2'-deoxy-2'-fluoroguanosine-3'-phosphate
  modified_base 17: mod_base = OTHER; note = 2'-O-methyluridine-3'-phosphate
  modified_base 18: mod_base = OTHER; note = 2'-deoxy-2'-fluorouridine-3'-phosphate
  modified_base 19: mod_base = OTHER; note = 2'-O-methylguanosine-3'-phosphate
  modified_base 20: mod_base = OTHER; note = 2'-deoxy-2'-fluorocytidine-3'-phosphate
  modified_base 21: mod_base = OTHER; note = 2'-O-methyluridine-3'-phosphorothioate
  modified_base 22: mod_base = OTHER; note = 2'-O-methylcytidine-3'-phosphorothioate
  modified_base 23: mod_base = OTHER; note = 2'-O-methyladenosine
tgactttgaacacatgttgctca

SEQ ID NO: 486 - RNA, 23 nt, synthetic construct
  source 1..23: mol_type = other RNA
  modified_base 1: mod_base = OTHER; note = 2'-O-methyladenosine-3'-phosphorothioate
  modified_base 2: mod_base = OTHER; note = 2'-deoxy-2'-fluoroadenosine-3'-phosphorothioate
  modified_base 3: mod_base = OTHER; note = 2'-O-methyladenosine-3'-phosphate
  modified_base 4: mod_base = OTHER; note = 2'-deoxy-2'-fluoroguanosine-3'-phosphate
  modified_base 5: mod_base = OTHER; note = 2'-O-methyluridine-3'-phosphate
  modified_base 6: mod_base = OTHER; note = 2'-deoxy-2'-fluoroadenosine-3'-phosphate
  modified_base 7: mod_base = OTHER; note = 2'-O-methylcytidine-3'-phosphate
  modified_base 8: mod_base = OTHER; note = 2'-deoxy-2'-fluorouridine-3'-phosphate
  modified_base 9: mod_base = OTHER; note = 2'-O-methylcytidine-3'-phosphate
  modified_base 10: mod_base = OTHER; note = 2'-deoxy-2'-fluoroadenosine-3'-phosphate
  modified_base 11: mod_base = OTHER; note = 2'-O-methylguanosine-3'-phosphate
  modified_base 12: mod_base = OTHER; note = 2'-O-methyladenosine-3'-phosphate
  modified_base 13: mod_base = OTHER; note = 2'-O-methylcytidine-3'-phosphate
  modified_base 14: mod_base = OTHER; note = 2'-deoxy-2'-fluoroadenosine-3'-phosphate
  modified_base 15: mod_base = OTHER; note = 2'-O-methylcytidine-3'-phosphate
  modified_base 16: mod_base = OTHER; note = 2'-deoxy-2'-fluorocytidine-3'-phosphate
  modified_base 17: mod_base = OTHER; note = 2'-O-methyladenosine-3'-phosphate
  modified_base 18: mod_base = OTHER; note = 2'-deoxy-2'-fluorocytidine-3'-phosphate
  modified_base 19: mod_base = OTHER; note = 2'-O-methyladenosine-3'-phosphate
  modified_base 20: mod_base = OTHER; note = 2'-deoxy-2'-fluoroguanosine-3'-phosphate
  modified_base 21: mod_base = OTHER; note = 2'-O-methylcytidine-3'-phosphorothioate
  modified_base 22: mod_base = OTHER; note = 2'-O-methylcytidine-3'-phosphorothioate
  modified_base 23: mod_base = OTHER; note = 2'-O-methylcytidine
aaagtactcagacaccacagccc

SEQ ID NO: 487 - RNA, 23 nt, synthetic construct
  source 1..23: mol_type = other RNA
taactcgccaccttctcaatcaa

SEQ ID NO: 488 - RNA, 23 nt, synthetic construct
  source 1..23: mol_type = other RNA
tgactttgaacacatgttgctca

SEQ ID NO: 489 - RNA, 23 nt, synthetic construct
  source 1..23: mol_type = other RNA
aaagtactcagacaccacagccc

SEQ ID NO: 490 - RNA, 23 nt, synthetic construct
  source 1..23: mol_type = other RNA
taactcgccaccttctcaatcaa

SEQ ID NO: 491 - RNA, 23 nt, synthetic construct
  source 1..23: mol_type = other RNA
tgactttgaacacatgttgctca

SEQ ID NO: 492 - RNA, 23 nt, synthetic construct
  source 1..23: mol_type = other RNA
aaagtactcagacaccacagccc
